United States Patent Application Publication US 2018/0305689 A1 - sequence listing, part 173

SEQ ID NO: 2573895 - RNA, 19 nt, Artificial Sequence
  Description of Artificial Sequence: Synthetic oligonucleotide
  Antisense strand to SEQ ID NO: 2573894
cuucguauaucauacuggc

SEQ ID NO: 2573896 - RNA, 19 nt, Artificial Sequence
  Description of Artificial Sequence: Synthetic oligonucleotide
  Sense strand starting at position 2456 of SEQ ID NO: 1889022
ggcauugaucgagauggca

SEQ ID NO: 2573897 - RNA, 19 nt, Artificial Sequence
  Description of Artificial Sequence: Synthetic oligonucleotide
  Antisense strand to SEQ ID NO: 2573896
ugccaucucgaucaaugcc

SEQ ID NO: 2573898 - RNA, 19 nt, Artificial Sequence
  Description of Artificial Sequence: Synthetic oligonucleotide
  Sense strand starting at position 2459 of SEQ ID NO: 1889022
auugaucgagauggcauaa

SEQ ID NO: 2573899 - RNA, 19 nt, Artificial Sequence
  Description of Artificial Sequence: Synthetic oligonucleotide
  Antisense strand to SEQ ID NO: 2573898
uuaugccaucucgaucaau

SEQ ID NO: 2573900 - RNA, 19 nt, Artificial Sequence
  Description of Artificial Sequence: Synthetic oligonucleotide
  Sense strand starting at position 2521 of SEQ ID NO: 1889022
gcuuccuuccugucuguua

SEQ ID NO: 2573901 - RNA, 19 nt, Artificial Sequence
  Description of Artificial Sequence: Synthetic oligonucleotide
  Antisense strand to SEQ ID NO: 2573900
uaacagacaggaaggaagc

SEQ ID NO: 2573902 - RNA, 19 nt, Artificial Sequence
  Description of Artificial Sequence: Synthetic oligonucleotide
  Sense strand starting at position 3040 of SEQ ID NO: 1889022
ugggcuuuaacguuguguu

SEQ ID NO: 2573903 - RNA, 19 nt, Artificial Sequence
  Description of Artificial Sequence: Synthetic oligonucleotide
  Antisense strand to SEQ ID NO: 2573902
aacacaacguuaaagccca

SEQ ID NO: 2573904 - RNA, 19 nt, Artificial Sequence
  Description of Artificial Sequence: Synthetic oligonucleotide
  Sense strand starting at position 3042 of SEQ ID NO: 1889022
ggcuuuaacguuguguucu

SEQ ID NO: 2573905 - RNA, 19 nt, Artificial Sequence
  Description of Artificial Sequence: Synthetic oligonucleotide
  Antisense strand to SEQ ID NO: 2573904
agaacacaacguuaaagcc

SEQ ID NO: 2573906 - RNA, 19 nt, Artificial Sequence
  Description of Artificial Sequence: Synthetic oligonucleotide
  Sense strand starting at position 3054 of SEQ ID NO: 1889022
guguucuuaggagacaguu

SEQ ID NO: 2573907 - RNA, 19 nt, Artificial Sequence
  Description of Artificial Sequence: Synthetic oligonucleotide
  Antisense strand to SEQ ID NO: 2573906
aacugucuccuaagaacac

SEQ ID NO: 2573908 - RNA, 19 nt, Artificial Sequence
  Description of Artificial Sequence: Synthetic oligonucleotide
  Sense strand starting at position 3056 of SEQ ID NO: 1889022
guucuuaggagacaguuua

SEQ ID NO: 2573909 - RNA, 19 nt, Artificial Sequence
  Description of Artificial Sequence: Synthetic oligonucleotide
  Antisense strand to SEQ ID NO: 2573908
uaaacugucuccuaagaac

SEQ ID NO: 2573910 - RNA, 19 nt, Artificial Sequence
  Description of Artificial Sequence: Synthetic oligonucleotide
  Sense strand starting at position 3093 of SEQ ID NO: 1889022
cuaacaguccaagagcuaa

SEQ ID NO: 2573911 - RNA, 19 nt, Artificial Sequence
  Description of Artificial Sequence: Synthetic oligonucleotide
  Antisense strand to SEQ ID NO: 2573910
uuagcucuuggacuguuag

SEQ ID NO: 2573912 - RNA, 19 nt, Artificial Sequence
  Description of Artificial Sequence: Synthetic oligonucleotide
  Sense strand starting at position 3156 of SEQ ID NO: 1889022
gcaacccuuguguacagau

SEQ ID NO: 2573913 - RNA, 19 nt, Artificial Sequence
  Description of Artificial Sequence: Synthetic oligonucleotide
  Antisense strand to SEQ ID NO: 2573912
aucuguacacaaggguugc

SEQ ID NO: 2573914 - RNA, 19 nt, Artificial Sequence
  Description of Artificial Sequence: Synthetic oligonucleotide
  Sense strand starting at position 3158 of SEQ ID NO: 1889022
aacccuuguguacagauga

SEQ ID NO: 2573915 - RNA, 19 nt, Artificial Sequence
  Description of Artificial Sequence: Synthetic oligonucleotide
  Antisense strand to SEQ ID NO: 2573914
ucaucuguacacaaggguu

SEQ ID NO: 2573916 - RNA, 19 nt, Artificial Sequence
  Description of Artificial Sequence: Synthetic oligonucleotide
  Sense strand starting at position 3241 of SEQ ID NO: 1889022
uccuauucccaggaaugcu

SEQ ID NO: 2573917 - RNA, 19 nt, Artificial Sequence
  Description of Artificial Sequence: Synthetic oligonucleotide
  Antisense strand to SEQ ID NO: 2573916
agcauuccugggaauagga

SEQ ID NO: 2573918 - RNA, 19 nt, Artificial Sequence
  Description of Artificial Sequence: Synthetic oligonucleotide
  Sense strand starting at position 3394 of SEQ ID NO: 1889022
guaaguuccacuugagcag

SEQ ID NO: 2573919 - RNA, 19 nt, Artificial Sequence
  Description of Artificial Sequence: Synthetic oligonucleotide
  Antisense strand to SEQ ID NO: 2573918
cugcucaaguggaacuuac

SEQ ID NO: 2573920 - RNA, 19 nt, Artificial Sequence
  Description of Artificial Sequence: Synthetic oligonucleotide
  Sense strand starting at position 3455 of SEQ ID NO: 1889022
ggugauacauaccuuuaaa

SEQ ID NO: 2573921 - RNA, 19 nt, Artificial Sequence
  Description of Artificial Sequence: Synthetic oligonucleotide
  Antisense strand to SEQ ID NO: 2573920
uuuaaagguauguaucacc

SEQ ID NO: 2573922 - RNA, 19 nt, Artificial Sequence
  Description of Artificial Sequence: Synthetic oligonucleotide
  Sense strand starting at position 3559 of SEQ ID NO: 1889022
uaugaaugagggugcuuaa

SEQ ID NO: 2573923 - RNA, 19 nt, Artificial Sequence
  Description of Artificial Sequence: Synthetic oligonucleotide
  Antisense strand to SEQ ID NO: 2573922
uuaagcacccucauucaua

SEQ ID NO: 2573924 - RNA, 19 nt, Artificial Sequence
  Description of Artificial Sequence: Synthetic oligonucleotide
  Sense strand starting at position 3562 of SEQ ID NO: 1889022
gaaugagggugcuuaaaug

SEQ ID NO: 2573925 - RNA, 19 nt, Artificial Sequence
  Description of Artificial Sequence: Synthetic oligonucleotide
  Antisense strand to SEQ ID NO: 2573924
cauuuaagcacccucauuc

SEQ ID NO: 2573926 - RNA, 19 nt, Artificial Sequence
  Description of Artificial Sequence: Synthetic oligonucleotide
  Sense strand starting at position 3577 of SEQ ID NO: 1889022
aaugguguuagagguuaag

SEQ ID NO: 2573927 - RNA, 19 nt, Artificial Sequence
  Description of Artificial Sequence: Synthetic oligonucleotide
  Antisense strand to SEQ ID NO: 2573926
cuuaaccucuaacaccauu

SEQ ID NO: 2573928 - RNA, 19 nt, Artificial Sequence
  Description of Artificial Sequence: Synthetic oligonucleotide
  Sense strand starting at position 3620 of SEQ ID NO: 1889022
uggucauagcauuaauauu

SEQ ID NO: 2573929 - RNA, 19 nt, Artificial Sequence
  Description of Artificial Sequence: Synthetic oligonucleotide
  Antisense strand to SEQ ID NO: 2573928
aauauuaaugcuaugacca

SEQ ID NO: 2573930 - RNA, 19 nt, Artificial Sequence
  Description of Artificial Sequence: Synthetic oligonucleotide
  Sense strand starting at position 140 of SEQ ID NO: 1889023
gcucaagaauagcugaauu

SEQ ID NO: 2573931 - RNA, 19 nt, Artificial Sequence
  Description of Artificial Sequence: Synthetic oligonucleotide
  Antisense strand to SEQ ID NO: 2573930
aauucagcuauucuugagc

SEQ ID NO: 2573932 - RNA, 19 nt, Artificial Sequence
  Description of Artificial Sequence: Synthetic oligonucleotide
  Sense strand starting at position 172 of SEQ ID NO: 1889023
cgaguuccauuaucuagaa

SEQ ID NO: 2573933 - RNA, 19 nt, Artificial Sequence
  Description of Artificial Sequence: Synthetic oligonucleotide
  Antisense strand to SEQ ID NO: 2573932
uucuagauaauggaacucg

SEQ ID NO: 2573934 - RNA, 19 nt, Artificial Sequence
  Description of Artificial Sequence: Synthetic oligonucleotide
  Sense strand starting at position 173 of SEQ ID NO: 1889023
gaguuccauuaucuagaag

SEQ ID NO: 2573935 - RNA, 19 nt, Artificial Sequence
  Description of Artificial Sequence: Synthetic oligonucleotide
  Antisense strand to SEQ ID NO: 2573934
cuucuagauaauggaacuc

SEQ ID NO: 2573936 - RNA, 19 nt, Artificial Sequence
  Description of Artificial Sequence: Synthetic oligonucleotide
  Sense strand starting at position 366 of SEQ ID NO: 1889023
ucuuauguagaauguauga

SEQ ID NO: 2573937 - RNA, 19 nt, Artificial Sequence
  Description of Artificial Sequence: Synthetic oligonucleotide
  Antisense strand to SEQ ID NO: 2573936
ucauacauucuacauaaga

SEQ ID NO: 2573938 - RNA, 19 nt, Artificial Sequence
  Description of Artificial Sequence: Synthetic oligonucleotide
  Sense strand starting at position 424 of SEQ ID NO: 1889023
agcaguugugcuguuugau

SEQ ID NO: 2573939 - RNA, 19 nt, Artificial Sequence
  Description of Artificial Sequence: Synthetic oligonucleotide
  Antisense strand to SEQ ID NO: 2573938
aucaaacagcacaacugcu

SEQ ID NO: 2573940 - RNA, 19 nt, Artificial Sequence
  Description of Artificial Sequence: Synthetic oligonucleotide
  Sense strand starting at position 425 of SEQ ID NO: 1889023
gcaguugugcuguuugauu

SEQ ID NO: 2573941 - RNA, 19 nt, Artificial Sequence
  Description of Artificial Sequence: Synthetic oligonucleotide
  Antisense strand to SEQ ID NO: 2573940
aaucaaacagcacaacugc

SEQ ID NO: 2573942 - RNA, 19 nt, Artificial Sequence
  Description of Artificial Sequence: Synthetic oligonucleotide
  Sense strand starting at position 530 of SEQ ID NO: 1889023
cuguaaauuuaugcaugca

SEQ ID NO: 2573943 - RNA, 19 nt, Artificial Sequence
  Description of Artificial Sequence: Synthetic oligonucleotide
  Antisense strand to SEQ ID NO: 2573942
ugcaugcauaaauuuacag

SEQ ID NO: 2573944 - RNA, 19 nt, Artificial Sequence
  Description of Artificial Sequence: Synthetic oligonucleotide
  Sense strand starting at position 549 of SEQ ID NO: 1889023
auguuuguagaagaaaugu

SEQ ID NO: 2573945 - RNA, 19 nt, Artificial Sequence
  Description of Artificial Sequence: Synthetic oligonucleotide
  Antisense strand to SEQ ID NO: 2573944
acauuucuucuacaaacau

SEQ ID NO: 2573946 - RNA, 19 nt, Artificial Sequence
  Description of Artificial Sequence: Synthetic oligonucleotide
  Sense strand starting at position 659 of SEQ ID NO: 1889023
cuccuaacucaggaucagu

SEQ ID NO: 2573947 - RNA, 19 nt, Artificial Sequence
  Description of Artificial Sequence: Synthetic oligonucleotide
  Antisense strand to SEQ ID NO: 2573946
acugauccugaguuaggag

SEQ ID NO: 2573948 - RNA, 19 nt, Artificial Sequence
  Description of Artificial Sequence: Synthetic oligonucleotide
  Sense strand starting at position 749 of SEQ ID NO: 1889023
uuauaaauucucggauccu

SEQ ID NO: 2573949 - RNA, 19 nt, Artificial Sequence
  Description of Artificial Sequence: Synthetic oligonucleotide
  Antisense strand to SEQ ID NO: 2573948
aggauccgagaauuuauaa

SEQ ID NO: 2573950 - RNA, 19 nt, Artificial Sequence
  Description of Artificial Sequence: Synthetic oligonucleotide
  Sense strand starting at position 769 of SEQ ID NO: 1889023
gauggacuguacuccacua

SEQ ID NO: 2573951 - RNA, 19 nt, Artificial Sequence
  Description of Artificial Sequence: Synthetic oligonucleotide
  Antisense strand to SEQ ID NO: 2573950
uaguggaguacaguccauc

SEQ ID NO: 2573952 - RNA, 19 nt, Artificial Sequence
  Description of Artificial Sequence: Synthetic oligonucleotide
  Sense strand starting at position 831 of SEQ ID NO: 1889023
aucccugaucauuacgauu

SEQ ID NO: 2573953 - RNA, 19 nt, Artificial Sequence
  Description of Artificial Sequence: Synthetic oligonucleotide
  Antisense strand to SEQ ID NO: 2573952
aaucguaaugaucagggau

SEQ ID NO: 2573954 - RNA, 19 nt, Artificial Sequence
  Description of Artificial Sequence: Synthetic oligonucleotide
  Sense strand starting at position 984 of SEQ ID NO: 1889023
agucucauccuuuaacugu

SEQ ID NO: 2573955 - RNA, 19 nt, Artificial Sequence
  Description of Artificial Sequence: Synthetic oligonucleotide
  Antisense strand to SEQ ID NO: 2573954
acaguuaaaggaugagacu

SEQ ID NO: 2573956 - RNA, 19 nt, Artificial Sequence
  Description of Artificial Sequence: Synthetic oligonucleotide
  Sense strand starting at position 1078 of SEQ ID NO: 1889023
guuguaaguguagaaagaa

SEQ ID NO: 2573957 - RNA, 19 nt, Artificial Sequence
  Description of Artificial Sequence: Synthetic oligonucleotide
  Antisense strand to SEQ ID NO: 2573956
uucuuucuacacuuacaac

SEQ ID NO: 2573958 - RNA, 19 nt, Artificial Sequence
  Description of Artificial Sequence: Synthetic oligonucleotide
  Sense strand starting at position 1229 of SEQ ID NO: 1889023
ucaagaagucccuaugccu

SEQ ID NO: 2573959 - RNA, 19 nt, Artificial Sequence
  Description of Artificial Sequence: Synthetic oligonucleotide
  Antisense strand to SEQ ID NO: 2573958
aggcauagggacuucuuga

SEQ ID NO: 2573960 - RNA, 19 nt, Artificial Sequence
  Description of Artificial Sequence: Synthetic oligonucleotide
  Sense strand starting at position 1297 of SEQ ID NO: 1889023
augauacacucgucagaaa

SEQ ID NO: 2573961 - RNA, 19 nt, Artificial Sequence
  Description of Artificial Sequence: Synthetic oligonucleotide
  Antisense strand to SEQ ID NO: 2573960
uuucugacgaguguaucau

SEQ ID NO: 2573962 - RNA, 19 nt, Artificial Sequence
  Description of Artificial Sequence: Synthetic oligonucleotide
  Sense strand starting at position 1627 of SEQ ID NO: 1889023
gugguuuggauagacggau

SEQ ID NO: 2573963 - RNA, 19 nt, Artificial Sequence
  Description of Artificial Sequence: Synthetic oligonucleotide
  Antisense strand to SEQ ID NO: 2573962
auccgucuauccaaaccac

SEQ ID NO: 2573964 - RNA, 19 nt, Artificial Sequence
  Description of Artificial Sequence: Synthetic oligonucleotide
  Sense strand starting at position 1815 of SEQ ID NO: 1889023
aucugaaucugaccgaaca

SEQ ID NO: 2573965 - RNA, 19 nt, Artificial Sequence
  Description of Artificial Sequence: Synthetic oligonucleotide
  Antisense strand to SEQ ID NO: 2573964
uguucggucagauucagau

SEQ ID NO: 2573966 - RNA, 19 nt, Artificial Sequence
  Description of Artificial Sequence: Synthetic oligonucleotide
  Sense strand starting at position 1816 of SEQ ID NO: 1889023
ucugaaucugaccgaacaa

SEQ ID NO: 2573967 - RNA, 19 nt, Artificial Sequence
  Description of Artificial Sequence: Synthetic oligonucleotide
  Antisense strand to SEQ ID NO: 2573966
uuguucggucagauucaga

SEQ ID NO: 2573968 - RNA, 19 nt, Artificial Sequence
  Description of Artificial Sequence: Synthetic oligonucleotide
  Sense strand starting at position 1858 of SEQ ID NO: 1889023
ucgucauagguggaugaga

SEQ ID NO: 2573969 - RNA, 19 nt, Artificial Sequence
  Description of Artificial Sequence: Synthetic oligonucleotide
  Antisense strand to SEQ ID NO: 2573968
ucucauccaccuaugacga

SEQ ID NO: 2573970 - RNA, 19 nt, Artificial Sequence
  Description of Artificial Sequence: Synthetic oligonucleotide
  Sense strand starting at position 2063 of SEQ ID NO: 1889023
cugauagaagacugccaau

SEQ ID NO: 2573971 - RNA, 19 nt, Artificial Sequence
  Description of Artificial Sequence: Synthetic oligonucleotide
  Antisense strand to SEQ ID NO: 2573970
auuggcagucuucuaucag

SEQ ID NO: 2573972 - RNA, 19 nt, Artificial Sequence
  Description of Artificial Sequence: Synthetic oligonucleotide
  Sense strand starting at position 2273 of SEQ ID NO: 1889023
gugcgcucagaccuguaau

SEQ ID NO: 2573973 - RNA, 19 nt, Artificial Sequence
  Description of Artificial Sequence: Synthetic oligonucleotide
  Antisense strand to SEQ ID NO: 2573972
auuacaggucugagcgcac

SEQ ID NO: 2573974 - RNA, 19 nt, Artificial Sequence
  Description of Artificial Sequence: Synthetic oligonucleotide
  Sense strand starting at position 2347 of SEQ ID NO: 1889023
cgagacgagccuggauaaa

SEQ ID NO: 2573975 - RNA, 19 nt, Artificial Sequence
  Description of Artificial Sequence: Synthetic oligonucleotide
  Antisense strand to SEQ ID NO: 2573974
uuuauccaggcucgucucg

SEQ ID NO: 2573976 - RNA, 19 nt, Artificial Sequence
  Description of Artificial Sequence: Synthetic oligonucleotide
  Sense strand starting at position 2661 of SEQ ID NO: 1889023
aaagauugugccuauguaa

SEQ ID NO: 2573977 - RNA, 19 nt, Artificial Sequence
  Description of Artificial Sequence: Synthetic oligonucleotide
  Antisense strand to SEQ ID NO: 2573976
uuacauaggcacaaucuuu

SEQ ID NO: 2573978 - RNA, 19 nt, Artificial Sequence
  Description of Artificial Sequence: Synthetic oligonucleotide
  Sense strand starting at position 2792 of SEQ ID NO: 1889023
ucagguauuugggaaugga

SEQ ID NO: 2573979 - RNA, 19 nt, Artificial Sequence
  Description of Artificial Sequence: Synthetic oligonucleotide
  Antisense strand to SEQ ID NO: 2573978
uccauucccaaauaccuga

SEQ ID NO: 2573980 - RNA, 19 nt, Artificial Sequence
  Description of Artificial Sequence: Synthetic oligonucleotide
  Sense strand starting at position 2969 of SEQ ID NO: 1889023
caauaaggcuuggcaugaa

SEQ ID NO: 2573981 - RNA, 19 nt, Artificial Sequence
  Description of Artificial Sequence: Synthetic oligonucleotide
  Antisense strand to SEQ ID NO: 2573980
uucaugccaagccuuauug

SEQ ID NO: 2573982 - RNA, 19 nt, Artificial Sequence
  Description of Artificial Sequence: Synthetic oligonucleotide
  Sense strand starting at position 3176 of SEQ ID NO: 1889023
gugaguugaaauuagccga

SEQ ID NO: 2573983 - RNA, 19 nt, Artificial Sequence
  Description of Artificial Sequence: Synthetic oligonucleotide
  Antisense strand to SEQ ID NO: 2573982
ucggcuaauuucaacucac

SEQ ID NO: 2573984 - RNA, 19 nt, Artificial Sequence
  Description of Artificial Sequence: Synthetic oligonucleotide
  Sense strand starting at position 3179 of SEQ ID NO: 1889023
aguugaaauuagccgagaa

SEQ ID NO: 2573985 - RNA, 19 nt, Artificial Sequence
  Description of Artificial Sequence: Synthetic oligonucleotide
  Antisense strand to SEQ ID NO: 2573984
uucucggcuaauuucaacu

SEQ ID NO: 2573986 - RNA, 19 nt, Artificial Sequence
  Description of Artificial Sequence: Synthetic oligonucleotide
  Sense strand starting at position 3180 of SEQ ID NO: 1889023
guugaaauuagccgagaaa

SEQ ID NO: 2573987 - RNA, 19 nt, Artificial Sequence
  Description of Artificial Sequence: Synthetic oligonucleotide
  Antisense strand to SEQ ID NO: 2573986
uuucucggcuaauuucaac

SEQ ID NO: 2573988 - RNA, 19 nt, Artificial Sequence
  Description of Artificial Sequence: Synthetic oligonucleotide
  Sense strand starting at position 3193 of SEQ ID NO: 1889023
gagaaaguauuggccauca

SEQ ID NO: 2573989 - RNA, 19 nt, Artificial Sequence
  Description of Artificial Sequence: Synthetic oligonucleotide
  Antisense strand to SEQ ID NO: 2573988
ugauggccaauacuuucuc

SEQ ID NO: 2573990 - RNA, 19 nt, Artificial Sequence
  Description of Artificial Sequence: Synthetic oligonucleotide
  Sense strand starting at position 3195 of SEQ ID NO: 1889023
gaaaguauuggccaucaca

SEQ ID NO: 2573991 - RNA, 19 nt, Artificial Sequence
  Description of Artificial Sequence: Synthetic oligonucleotide
  Antisense strand to SEQ ID NO: 2573990
ugugauggccaauacuuuc

SEQ ID NO: 2573992 - RNA, 19 nt, Artificial Sequence
  Description of Artificial Sequence: Synthetic oligonucleotide
  Sense strand starting at position 3198 of SEQ ID NO: 1889023
aguauuggccaucacagau

SEQ ID NO: 2573993 - RNA, 19 nt, Artificial Sequence
  Description of Artificial Sequence: Synthetic oligonucleotide
  Antisense strand to SEQ ID NO: 2573992
aucugugauggccaauacu

SEQ ID NO: 2573994 - RNA, 19 nt, Artificial Sequence
  Description of Artificial Sequence: Synthetic oligonucleotide
  Sense strand starting at position 3317 of SEQ ID NO: 1889023
gucuaauaauacuugaaug

SEQ ID NO: 2573995 - RNA, 19 nt, Artificial Sequence
  Description of Artificial Sequence: Synthetic oligonucleotide
  Antisense strand to SEQ ID NO: 2573994
cauucaaguauuauuagac

SEQ ID NO: 2573996 - RNA, 19 nt, Artificial Sequence
  Description of Artificial Sequence: Synthetic oligonucleotide
  Sense strand starting at position 3368 of SEQ ID NO: 1889023
ggaguuacuuucuuacuua

SEQ ID NO: 2573997 - RNA, 19 nt, Artificial Sequence
  Description of Artificial Sequence: Synthetic oligonucleotide
  Antisense strand to SEQ ID NO: 2573996
uaaguaagaaaguaacucc

SEQ ID NO: 2573998 - RNA, 19 nt, Artificial Sequence
  Description of Artificial Sequence: Synthetic oligonucleotide
  Sense strand starting at position 3671 of SEQ ID NO: 1889023
ccuuuagauccacaucugu

SEQ ID NO: 2573999 - RNA, 19 nt, Artificial Sequence
  Description of Artificial Sequence: Synthetic oligonucleotide
  Antisense strand to SEQ ID NO: 2573998
acagauguggaucuaaagg

SEQ ID NO: 2574000 - RNA, 19 nt, Artificial Sequence
  Description of Artificial Sequence: Synthetic oligonucleotide
  Sense strand starting at position 3676 of SEQ ID NO: 1889023
agauccacaucuguguaua

SEQ ID NO: 2574001 - RNA, 19 nt, Artificial Sequence
  Description of Artificial Sequence: Synthetic oligonucleotide
  Antisense strand to SEQ ID NO: 2574000
uauacacagauguggaucu

SEQ ID NO: 2574002 - RNA, 19 nt, Artificial Sequence
  Description of Artificial Sequence: Synthetic oligonucleotide
  Sense strand starting at position 3827 of SEQ ID NO: 1889023
cuguuauugcaagggaaag

SEQ ID NO: 2574003 - RNA, 19 nt, Artificial Sequence
  Description of Artificial Sequence: Synthetic oligonucleotide
  Antisense strand to SEQ ID NO: 2574002
cuuucccuugcaauaacag

SEQ ID NO: 2574004 - RNA, 19 nt, Artificial Sequence
  Description of Artificial Sequence: Synthetic oligonucleotide
  Sense strand starting at position 3910 of SEQ ID NO: 1889023
uuuacauagcacuggagau

SEQ ID NO: 2574005 - RNA, 19 nt, Artificial Sequence
  Description of Artificial Sequence: Synthetic oligonucleotide
  Antisense strand to SEQ ID NO: 2574004
aucuccagugcuauguaaa

SEQ ID NO: 2574006 - RNA, 19 nt, Artificial Sequence
  Description of Artificial Sequence: Synthetic oligonucleotide
  Sense strand starting at position 3929 of SEQ ID NO: 1889023
augugauaauucucaagua

SEQ ID NO: 2574007 - RNA, 19 nt, Artificial Sequence
  Description of Artificial Sequence: Synthetic oligonucleotide
  Antisense strand to SEQ ID NO: 2574006
uacuugagaauuaucacau

SEQ ID NO: 2574008 - RNA, 19 nt, Artificial Sequence
  Description of Artificial Sequence: Synthetic oligonucleotide
  Sense strand starting at position 3978 of SEQ ID NO: 1889023
caauguggccuacaguaga

SEQ ID NO: 2574009 - RNA, 19 nt, Artificial Sequence
  Description of Artificial Sequence: Synthetic oligonucleotide
  Antisense strand to SEQ ID NO: 2574008
ucuacuguaggccacauug

SEQ ID NO: 2574010 - RNA, 19 nt, Artificial Sequence
  Description of Artificial Sequence: Synthetic oligonucleotide
  Sense strand starting at position 1 of SEQ ID NO: 1889024
aguuuaauaucacuuggga

SEQ ID NO: 2574011 - RNA, 19 nt, Artificial Sequence
  Description of Artificial Sequence: Synthetic oligonucleotide
  Antisense strand to SEQ ID NO: 2574010
ucccaagugauauuaaacu

SEQ ID NO: 2574012 - RNA, 19 nt, Artificial Sequence
  Description of Artificial Sequence: Synthetic oligonucleotide
  Sense strand starting at position 116 of SEQ ID NO: 1889024
gucaaugaaugauuguuau

SEQ ID NO: 2574013 - RNA, 19 nt, Artificial Sequence
  Description of Artificial Sequence: Synthetic oligonucleotide
  Antisense strand to SEQ ID NO: 2574012
auaacaaucauucauugac

SEQ ID NO: 2574014 - RNA, 19 nt, Artificial Sequence
  Description of Artificial Sequence: Synthetic oligonucleotide
  Sense strand starting at position 213 of SEQ ID NO: 1889024
accucugagccucaagaau

SEQ ID NO: 2574015 - RNA, 19 nt, Artificial Sequence
  Description of Artificial Sequence: Synthetic oligonucleotide
  Antisense strand to SEQ ID NO: 2574014
auucuugaggcucagaggu

SEQ ID NO: 2574016 - RNA, 19 nt, Artificial Sequence
  Description of Artificial Sequence: Synthetic oligonucleotide
  Sense strand starting at position 293 of SEQ ID NO: 1889024
gcaugucaaucuuugaaag

SEQ ID NO: 2574017 - RNA, 19 nt, Artificial Sequence
  Description of Artificial Sequence: Synthetic oligonucleotide
  Antisense strand to SEQ ID NO: 2574016
cuuucaaagauugacaugc

SEQ ID NO: 2574018 - RNA, 19 nt, Artificial Sequence
  Description of Artificial Sequence: Synthetic oligonucleotide
  Sense strand starting at position 320 of SEQ ID NO: 1889024
auagaaagcuggucagauc

SEQ ID NO: 2574019 - RNA, 19 nt, Artificial Sequence
  Description of Artificial Sequence: Synthetic oligonucleotide
  Antisense strand to SEQ ID NO: 2574018
gaucugaccagcuuucuau

SEQ ID NO: 2574020 - RNA, 19 nt, Artificial Sequence
  Description of Artificial Sequence: Synthetic oligonucleotide
  Sense strand starting at position 492 of SEQ ID NO: 1889024
caccucuaucagggaugua

SEQ ID NO: 2574021 - RNA, 19 nt, Artificial Sequence
  Description of Artificial Sequence: Synthetic oligonucleotide
  Antisense strand to SEQ ID NO: 2574020
uacaucccugauagaggug

SEQ ID NO: 2574022 - RNA, 19 nt, Artificial Sequence
  Description of Artificial Sequence: Synthetic oligonucleotide
  Sense strand starting at position 626 of SEQ ID NO: 1889024
agagguacucuuuacagca

SEQ ID NO: 2574023 - RNA, 19 nt, Artificial Sequence
  Description of Artificial Sequence: Synthetic oligonucleotide
  Antisense strand to SEQ ID NO: 2574022
ugcuguaaagaguaccucu

SEQ ID NO: 2574024 - RNA, 19 nt, Artificial Sequence
  Description of Artificial Sequence: Synthetic oligonucleotide
  Sense strand starting at position 691 of SEQ ID NO: 1889024
aaaguuugacaaggcauau

SEQ ID NO: 2574025 - RNA, 19 nt, Artificial Sequence
  Description of Artificial Sequence: Synthetic oligonucleotide
  Antisense strand to SEQ ID NO: 2574024
auaugccuugucaaacuuu

SEQ ID NO: 2574026 - RNA, 19 nt, Artificial Sequence
  Description of Artificial Sequence: Synthetic oligonucleotide
  Sense strand starting at position 798 of SEQ ID NO: 1889024
gaccauuaauggucuguau

SEQ ID NO: 2574027 - RNA, 19 nt, Artificial Sequence
  Description of Artificial Sequence: Synthetic oligonucleotide
  Antisense strand to SEQ ID NO: 2574026
auacagaccauuaaugguc

SEQ ID NO: 2574028 - RNA, 19 nt, Artificial Sequence
  Description of Artificial Sequence: Synthetic oligonucleotide
  Sense strand starting at position 818 of SEQ ID NO: 1889024
cugagucaccuaugauaua

SEQ ID NO: 2574029 - RNA, 19 nt, Artificial Sequence
  Description of Artificial Sequence: Synthetic oligonucleotide
  Antisense strand to SEQ ID NO: 2574028
uauaucauaggugacucag

SEQ ID NO: 2574030 - RNA, 19 nt, Artificial Sequence
  Description of Artificial Sequence: Synthetic oligonucleotide
  Sense strand starting at position 1002 of SEQ ID NO: 1889024
ggucgaauaaguggguaaa

SEQ ID NO: 2574031 - RNA, 19 nt, Artificial Sequence
  Description of Artificial Sequence: Synthetic oligonucleotide
  Antisense strand to SEQ ID NO: 2574030
uuuacccacuuauucgacc

SEQ ID NO: 2574032 - RNA, 19 nt, Artificial Sequence
  Description of Artificial Sequence: Synthetic oligonucleotide
  Sense strand starting at position 1005 of SEQ ID NO: 1889024
cgaauaaguggguaaagcu

SEQ ID NO: 2574033 - RNA, 19 nt, Artificial Sequence
  Description of Artificial Sequence: Synthetic oligonucleotide
  Antisense strand to SEQ ID NO: 2574032
agcuuuacccacuuauucg

SEQ ID NO: 2574034 - RNA, 19 nt, Artificial Sequence
  Description of Artificial Sequence: Synthetic oligonucleotide
  Sense strand starting at position 1068 of SEQ ID NO: 1889024
uccugagaaggguguagaa

SEQ ID NO: 2574035 - RNA, 19 nt, Artificial Sequence
  Description of Artificial Sequence: Synthetic oligonucleotide
  Antisense strand to SEQ ID NO: 2574034
uucuacacccuucucagga

SEQ ID NO: 2574036 - RNA, 19 nt, Artificial Sequence
  Description of Artificial Sequence: Synthetic oligonucleotide
  Sense strand starting at position 1239 of SEQ ID NO: 1889024
ggaauacugugaccaaagu

SEQ ID NO: 2574037 - RNA, 19 nt, Artificial Sequence
  Description of Artificial Sequence: Synthetic oligonucleotide
  Antisense strand to SEQ ID NO: 2574036
acuuuggucacaguauucc

SEQ ID NO: 2574038 - RNA, 19 nt, Artificial Sequence
  Description of Artificial Sequence: Synthetic oligonucleotide
  Sense strand starting at position 1272 of SEQ ID NO: 1889024
augguucuaucauugauag

SEQ ID NO: 2574039 - RNA, 19 nt, Artificial Sequence
  Description of Artificial Sequence: Synthetic oligonucleotide
  Antisense strand to SEQ ID NO: 2574038
cuaucaaugauagaaccau

SEQ ID NO: 2574040 - RNA, 19 nt, Artificial Sequence
  Description of Artificial Sequence: Synthetic oligonucleotide
  Sense strand starting at position 1273 of SEQ ID NO: 1889024
ugguucuaucauugauaga

SEQ ID NO: 2574041 - RNA, 19 nt, Artificial Sequence
  Description of Artificial Sequence: Synthetic oligonucleotide
  Antisense strand to SEQ ID NO: 2574040
ucuaucaaugauagaacca

SEQ ID NO: 2574042 - RNA, 19 nt, Artificial Sequence
  Description of Artificial Sequence: Synthetic oligonucleotide
  Sense strand starting at position 1284 of SEQ ID NO: 1889024
uugauagaacguuaucauu

SEQ ID NO: 2574043 - RNA, 19 nt, Artificial Sequence
  Description of Artificial Sequence: Synthetic oligonucleotide
  Antisense strand to SEQ ID NO: 2574042
aaugauaacguucuaucaa

SEQ ID NO: 2574044 - RNA, 19 nt, Artificial Sequence
  Description of Artificial Sequence: Synthetic oligonucleotide
  Sense strand starting at position 1286 of SEQ ID NO: 1889024
gauagaacguuaucauuga

SEQ ID NO: 2574045 - RNA, 19 nt, Artificial Sequence
  Description of Artificial Sequence: Synthetic oligonucleotide
  Antisense strand to SEQ ID NO: 2574044
ucaaugauaacguucuauc

SEQ ID NO: 2574046 - RNA, 19 nt, Artificial Sequence
  Description of Artificial Sequence: Synthetic oligonucleotide
  Sense strand starting at position 1290 of SEQ ID NO: 1889024
gaacguuaucauugagacc

SEQ ID NO: 2574047 - RNA, 19 nt, Artificial Sequence
  Description of Artificial Sequence: Synthetic oligonucleotide
  Antisense strand to SEQ ID NO: 2574046
ggucucaaugauaacguuc

SEQ ID NO: 2574048 - RNA, 19 nt, Artificial Sequence
  Description of Artificial Sequence: Synthetic oligonucleotide
  Sense strand starting at position 1543 of SEQ ID NO: 1889024
guugccacuaucgaugaaa

SEQ ID NO: 2574049 - RNA, 19 nt, Artificial Sequence
  Description of Artificial Sequence: Synthetic oligonucleotide
  Antisense strand to SEQ ID NO: 2574048
uuucaucgauaguggcaac

SEQ ID NO: 2574050 - RNA, 19 nt, Artificial Sequence
  Description of Artificial Sequence: Synthetic oligonucleotide
  Sense strand starting at position 1683 of SEQ ID NO: 1889024
guuacaagccuacaaaguu

SEQ ID NO: 2574051 - RNA, 19 nt, Artificial Sequence
  Description of Artificial Sequence: Synthetic oligonucleotide
  Antisense strand to SEQ ID NO: 2574050
aacuuuguaggcuuguaac

SEQ ID NO: 2574052 - RNA, 19 nt, Artificial Sequence
  Description of Artificial Sequence: Synthetic oligonucleotide
  Sense strand starting at position 1713 of SEQ ID NO: 1889024
cuucgaguuagguaucaag

SEQ ID NO: 2574053 - RNA, 19 nt, Artificial Sequence
  Description of Artificial Sequence: Synthetic oligonucleotide
  Antisense strand to SEQ ID NO: 2574052
cuugauaccuaacucgaag

SEQ ID NO: 2574054 - RNA, 19 nt, Artificial Sequence
  Description of Artificial Sequence: Synthetic oligonucleotide
  Sense strand starting at position 1795 of SEQ ID NO: 1889024
uuguuuacugccuaaggga

SEQ ID NO: 2574055 - RNA, 19 nt, Artificial Sequence
  Description of Artificial Sequence: Synthetic oligonucleotide
  Antisense strand to SEQ ID NO: 2574054
ucccuuaggcaguaaacaa

SEQ ID NO: 2574056 - RNA, 19 nt, Artificial Sequence
  Description of Artificial Sequence: Synthetic oligonucleotide
  Sense strand starting at position 2187 of SEQ ID NO: 1889024
cauauauucugagugggua

SEQ ID NO: 2574057 - RNA, 19 nt, Artificial Sequence
  Description of Artificial Sequence: Synthetic oligonucleotide
  Antisense strand to SEQ ID NO: 2574056
uacccacucagaauauaug

SEQ ID NO: 2574058 - RNA, 19 nt, Artificial Sequence
  Description of Artificial Sequence: Synthetic oligonucleotide
  Sense strand starting at position 2188 of SEQ ID NO: 1889024
auauauucugaguggguau

SEQ ID NO: 2574059 - RNA, 19 nt, Artificial Sequence
  Description of Artificial Sequence: Synthetic oligonucleotide
  Antisense strand to SEQ ID NO: 2574058
auacccacucagaauauau

SEQ ID NO: 2574060 - RNA, 19 nt, Artificial Sequence
  Description of Artificial Sequence: Synthetic oligonucleotide
  Sense strand starting at position 2416 of SEQ ID NO: 1889024
ugaugauaauuauccuagu

SEQ ID NO: 2574061 - RNA, 19 nt, Artificial Sequence
  Description of Artificial Sequence: Synthetic oligonucleotide
  Antisense strand to SEQ ID NO: 2574060
acuaggauaauuaucauca

SEQ ID NO: 2574062 - RNA, 19 nt, Artificial Sequence
  Description of Artificial Sequence: Synthetic oligonucleotide
  Sense strand starting at position 2563 of SEQ ID NO: 1889024
gaccuuagaguacgugaga

SEQ ID NO: 2574063 - RNA, 19 nt, Artificial Sequence
  Description of Artificial Sequence: Synthetic oligonucleotide
  Antisense strand to SEQ ID NO: 2574062
ucucacguacucuaagguc

SEQ ID NO: 2574064 - RNA, 19 nt, Artificial Sequence
  Description of Artificial Sequence: Synthetic oligonucleotide
  Sense strand starting at position 2566 of SEQ ID NO: 1889024
cuuagaguacgugagacaa

SEQ ID NO: 2574065 - RNA, 19 nt, Artificial Sequence
  Description of Artificial Sequence: Synthetic oligonucleotide
  Antisense strand to SEQ ID NO: 2574064
uugucucacguacucuaag

SEQ ID NO: 2574066 - RNA, 19 nt, Artificial Sequence
  Description of Artificial Sequence: Synthetic oligonucleotide
  Sense strand starting at position 2813 of SEQ ID NO: 1889024
ggaagugagcuccaugucu

SEQ ID NO: 2574067 - RNA, 19 nt, Artificial Sequence
  Description of Artificial Sequence: Synthetic oligonucleotide
  Antisense strand to SEQ ID NO: 2574066
agacauggagcucacuucc

SEQ ID NO: 2574068 - RNA, 19 nt, Artificial Sequence
  Description of Artificial Sequence: Synthetic oligonucleotide
  Sense strand starting at position 2971 of SEQ ID NO: 1889024
augcauuccagauggaagu

SEQ ID NO: 2574069 - RNA, 19 nt, Artificial Sequence
  Description of Artificial Sequence: Synthetic oligonucleotide
  Antisense strand to SEQ ID NO: 2574068
acuuccaucuggaaugcau

SEQ ID NO: 2574070 - RNA, 19 nt, Artificial Sequence
  Description of Artificial Sequence: Synthetic oligonucleotide
  Sense strand starting at position 2972 of SEQ ID NO: 1889024
ugcauuccagauggaagua

SEQ ID NO: 2574071 - RNA, 19 nt, Artificial Sequence
  Description of Artificial Sequence: Synthetic oligonucleotide
  Antisense strand to SEQ ID NO: 2574070
uacuuccaucuggaaugca

SEQ ID NO: 2574072 - RNA, 19 nt, Artificial Sequence
  Description of Artificial Sequence: Synthetic oligonucleotide
  Sense strand starting at position 3022 of SEQ ID NO: 1889024
accaacuuucugggaguuu

SEQ ID NO: 2574073 - RNA, 19 nt, Artificial Sequence
  Description of Artificial Sequence: Synthetic oligonucleotide
  Antisense strand to SEQ ID NO: 2574072
aaacucccagaaaguuggu

SEQ ID NO: 2574074 - RNA, 19 nt, Artificial Sequence
  Description of Artificial Sequence: Synthetic oligonucleotide
  Sense strand starting at position 3033 of SEQ ID NO: 1889024
gggaguuuaggaggucaac

SEQ ID NO: 2574075 - RNA, 19 nt, Artificial Sequence
  Description of Artificial Sequence: Synthetic oligonucleotide
  Antisense strand to SEQ ID NO: 2574074
guugaccuccuaaacuccc

SEQ ID NO: 2574076 - RNA, 19 nt, Artificial Sequence
  Description of Artificial Sequence: Synthetic oligonucleotide
  Sense strand starting at position 3201 of SEQ ID NO: 1889024
gaauauagugagcaccuua

SEQ ID NO: 2574077 - RNA, 19 nt, Artificial Sequence
  Description of Artificial Sequence: Synthetic oligonucleotide
  Antisense strand to SEQ ID NO: 2574076
uaaggugcucacuauauuc

SEQ ID NO: 2574078 - RNA, 19 nt, Artificial Sequence
  Description of Artificial Sequence: Synthetic oligonucleotide
  Sense strand starting at position 3391 of SEQ ID NO: 1889024
gguguauauguugaggaaa

SEQ ID NO: 2574079 - RNA, 19 nt, Artificial Sequence
  Description of Artificial Sequence: Synthetic oligonucleotide
  Antisense strand to SEQ ID NO: 2574078
uuuccucaacauauacacc

SEQ ID NO: 2574080 - RNA, 19 nt, Artificial Sequence
  Description of Artificial Sequence: Synthetic oligonucleotide
  Sense strand starting at position 3509 of SEQ ID NO: 1889024
uuggucauaagucacagua

SEQ ID NO: 2574081 - RNA, 19 nt, Artificial Sequence
  Description of Artificial Sequence: Synthetic oligonucleotide
  Antisense strand to SEQ ID NO: 2574080
uacugugacuuaugaccaa

SEQ ID NO: 2574082 - RNA, 19 nt, Artificial Sequence
  Description of Artificial Sequence: Synthetic oligonucleotide
  Sense strand starting at position 3745 of SEQ ID NO: 1889024
agccucaaccaaugggaau

SEQ ID NO: 2574083 - RNA, 19 nt, Artificial Sequence
  Description of Artificial Sequence: Synthetic oligonucleotide
  Antisense strand to SEQ ID NO: 2574082
auucccauugguugaggcu

SEQ ID NO: 2574084 - RNA, 19 nt, Artificial Sequence
  Description of Artificial Sequence: Synthetic oligonucleotide
  Sense strand starting at position 3762 of SEQ ID NO: 1889024
auggaaguugagugauaga

SEQ ID NO: 2574085 - RNA, 19 nt, Artificial Sequence
  Description of Artificial Sequence: Synthetic oligonucleotide
  Antisense strand to SEQ ID NO: 2574084
ucuaucacucaacuuccau

SEQ ID NO: 2574086 - RNA, 19 nt, Artificial Sequence
  Description of Artificial Sequence: Synthetic oligonucleotide
  Sense strand starting at position 3816 of SEQ ID NO: 1889024
ugaggugugaucuacaguu

SEQ ID NO: 2574087 - RNA, 19 nt, Artificial Sequence
  Description of Artificial Sequence: Synthetic oligonucleotide
  Antisense strand to SEQ ID NO: 2574086
aacuguagaucacaccuca

SEQ ID NO: 2574088 - RNA, 19 nt, Artificial Sequence
  Description of Artificial Sequence: Synthetic oligonucleotide
  Sense strand starting at position 3818 of SEQ ID NO: 1889024
aggugugaucuacaguuuc

SEQ ID NO: 2574089 - RNA, 19 nt, Artificial Sequence
  Description of Artificial Sequence: Synthetic oligonucleotide
  Antisense strand to SEQ ID NO: 2574088
gaaacuguagaucacaccu

SEQ ID NO: 2574090 - RNA, 19 nt, Artificial Sequence
  Description of Artificial Sequence: Synthetic oligonucleotide
  Sense strand starting at position 60 of SEQ ID NO: 1889025
caaaguguguccucuguaa

SEQ ID NO: 2574091 - RNA, 19 nt, Artificial Sequence
  Description of Artificial Sequence: Synthetic oligonucleotide
  Antisense strand to SEQ ID NO: 2574090
uuacagaggacacacuuug

SEQ ID NO: 2574092 - RNA, 19 nt, Artificial Sequence
  Description of Artificial Sequence: Synthetic oligonucleotide
  Sense strand starting at position 64 of SEQ ID NO: 1889025
guguguccucuguaacuac

SEQ ID NO: 2574093 - RNA, 19 nt, Artificial Sequence
  Description of Artificial Sequence: Synthetic oligonucleotide
  Antisense strand to SEQ ID NO: 2574092
guaguuacagaggacacac

SEQ ID NO: 2574094 - RNA, 19 nt, Artificial Sequence
  Description of Artificial Sequence: Synthetic oligonucleotide
  Sense strand starting at position 67 of SEQ ID NO: 1889025
uguccucuguaacuacaau

SEQ ID NO: 2574095 - RNA, 19 nt, Artificial Sequence
  Description of Artificial Sequence: Synthetic oligonucleotide
  Antisense strand to SEQ ID NO: 2574094
auuguaguuacagaggaca

SEQ ID NO: 2574096 - RNA, 19 nt, Artificial Sequence
  Description of Artificial Sequence: Synthetic oligonucleotide
  Sense strand starting at position 129 of SEQ ID NO: 1889025
agacgugaugcccaaucua

SEQ ID NO: 2574097 - RNA, 19 nt, Artificial Sequence
  Description of Artificial Sequence: Synthetic oligonucleotide
  Antisense strand to SEQ ID NO: 2574096
uagauugggcaucacgucu

SEQ ID NO: 2574098 - RNA, 19 nt, Artificial Sequence
  Description of Artificial Sequence: Synthetic oligonucleotide
  Sense strand starting at position 192 of SEQ ID NO: 1889025
agacgugaggcccaaucua

SEQ ID NO: 2574099 - RNA, 19 nt, Artificial Sequence
  Description of Artificial Sequence: Synthetic oligonucleotide
  Antisense strand to SEQ ID NO: 2574098
uagauugggccucacgucu

SEQ ID NO: 2574100 - RNA, 19 nt, Artificial Sequence
  Description of Artificial Sequence: Synthetic oligonucleotide
  Sense strand starting at position 200 of SEQ ID NO: 1889025
ggcccaaucuaucccagaa

SEQ ID NO: 2574101 - RNA, 19 nt, Artificial Sequence
  Description of Artificial Sequence: Synthetic oligonucleotide
  Antisense strand to SEQ ID NO: 2574100
uucugggauagauugggcc

SEQ ID NO: 2574102 - RNA, 19 nt, Artificial Sequence
  Description of Artificial Sequence: Synthetic oligonucleotide
  Sense strand starting at position 210 of SEQ ID NO: 1889025
aucccagaaagguguguua

SEQ ID NO: 2574103 - RNA, 19 nt, Artificial Sequence
  Description of Artificial Sequence: Synthetic oligonucleotide
  Antisense strand to SEQ ID NO: 2574102
uaacacaccuuucugggau

SEQ ID NO: 2574104 - RNA, 19 nt, Artificial Sequence
  Description of Artificial Sequence: Synthetic oligonucleotide
  Sense strand starting at position 212 of SEQ ID NO: 1889025
cccagaaagguguguuaau

SEQ ID NO: 2574105 - RNA, 19 nt, Artificial Sequence
  Description of Artificial Sequence: Synthetic oligonucleotide
  Antisense strand to SEQ ID NO: 2574104
auuaacacaccuuucuggg

SEQ ID NO: 2574106 - RNA, 19 nt, Artificial Sequence
  Description of Artificial Sequence: Synthetic oligonucleotide
  Sense strand starting at position 213 of SEQ ID NO: 1889025
ccagaaagguguguuaauc

SEQ ID NO: 2574107 - RNA, 19 nt, Artificial Sequence
  Description of Artificial Sequence: Synthetic oligonucleotide
  Antisense strand to SEQ ID NO: 2574106
gauuaacacaccuuucugg

SEQ ID NO: 2574108 - RNA, 19 nt, Artificial Sequence
  Description of Artificial Sequence: Synthetic oligonucleotide
  Sense strand starting at position 280 of SEQ ID NO: 1889025
gguggaaacuuucccaacu

SEQ ID NO: 2574109 - RNA, 19 nt, Artificial Sequence
  Description of Artificial Sequence: Synthetic oligonucleotide
  Antisense strand to SEQ ID NO: 2574108
aguugggaaaguuuccacc

SEQ ID NO: 2574110 - RNA, 19 nt, Artificial Sequence
  Description of Artificial Sequence: Synthetic oligonucleotide
  Sense strand starting at position 347 of SEQ ID NO: 1889025
gcaauaaacucagaaaugg

SEQ ID NO: 2574111 - RNA, 19 nt, Artificial Sequence
  Description of Artificial Sequence: Synthetic oligonucleotide
  Antisense strand to SEQ ID NO: 2574110
ccauuucugaguuuauugc

SEQ ID NO: 2574112 - RNA, 19 nt, Artificial Sequence
  Description of Artificial Sequence: Synthetic oligonucleotide
  Sense strand starting at position 602 of SEQ ID NO: 1889025
ugggccuuccuagaaucau

SEQ ID NO: 2574113 - RNA, 19 nt, Artificial Sequence
  Description of Artificial Sequence: Synthetic oligonucleotide
  Antisense strand to SEQ ID NO: 2574112
augauucuaggaaggccca

SEQ ID NO: 2574114 - RNA, 19 nt, Artificial Sequence
  Description of Artificial Sequence: Synthetic oligonucleotide
  Sense strand starting at position 1234 of SEQ ID NO: 1889025
accuuuaugcuaggcacua

SEQ ID NO: 2574115 - RNA, 19 nt, Artificial Sequence
  Description of Artificial Sequence: Synthetic oligonucleotide
  Antisense strand to SEQ ID NO: 2574114
uagugccuagcauaaaggu

SEQ ID NO: 2574116 - RNA, 19 nt, Artificial Sequence
  Description of Artificial Sequence: Synthetic oligonucleotide
  Sense strand starting at position 1235 of SEQ ID NO: 1889025
ccuuuaugcuaggcacuau

SEQ ID NO: 2574117 - RNA, 19 nt, Artificial Sequence
  Description of Artificial Sequence: Synthetic oligonucleotide
  Antisense strand to SEQ ID NO: 2574116
auagugccuagcauaaagg

SEQ ID NO: 2574118 - RNA, 19 nt, Artificial Sequence
  Description of Artificial Sequence: Synthetic oligonucleotide
  Sense strand starting at position 1252 of SEQ ID NO: 1889025
augcuacaugcuuaguaua

SEQ ID NO: 2574119 - RNA, 19 nt, Artificial Sequence
  Description of Artificial Sequence: Synthetic oligonucleotide
  Antisense strand to SEQ ID NO: 2574118
uauacuaagcauguagcau

SEQ ID NO: 2574120 - RNA, 19 nt, Artificial Sequence
  Description of Artificial Sequence: Synthetic oligonucleotide
  Sense strand starting at position 1254 of SEQ ID NO: 1889025
gcuacaugcuuaguauaaa

SEQ ID NO: 2574121 - RNA, 19 nt, Artificial Sequence
  Description of Artificial Sequence: Synthetic oligonucleotide
  Antisense strand to SEQ ID NO: 2574120
uuuauacuaagcauguagc

SEQ ID NO: 2574122 - RNA, 19 nt, Artificial Sequence
  Description of Artificial Sequence: Synthetic oligonucleotide
  Sense strand starting at position 1404 of SEQ ID NO: 1889025
guaacagggcaaugacaua

SEQ ID NO: 2574123 - RNA, 19 nt, Artificial Sequence
  Description of Artificial Sequence: Synthetic oligonucleotide
  Antisense strand to SEQ ID NO: 2574122
uaugucauugcccuguuac

SEQ ID NO: 2574124 - RNA, 19 nt, Artificial Sequence
  Description of Artificial Sequence: Synthetic oligonucleotide
  Sense strand starting at position 1417 of SEQ ID NO: 1889025
gacauaucagguuguaagg

SEQ ID NO: 2574125 - RNA, 19 nt, Artificial Sequence
  Description of Artificial Sequence: Synthetic oligonucleotide
  Antisense strand to SEQ ID NO: 2574124
ccuuacaaccugauauguc

SEQ ID NO: 2574126 - RNA, 19 nt, Artificial Sequence
  Description of Artificial Sequence: Synthetic oligonucleotide
  Sense strand starting at position 1448 of SEQ ID NO: 1889025
agauaaagugccuguuaca

SEQ ID NO: 2574127 - RNA, 19 nt, Artificial Sequence
  Description of Artificial Sequence: Synthetic oligonucleotide
  Antisense strand to SEQ ID NO: 2574126
uguaacaggcacuuuaucu

SEQ ID NO: 2574128 - RNA, 19 nt, Artificial Sequence
  Description of Artificial Sequence: Synthetic oligonucleotide
  Sense strand starting at position 2110 of SEQ ID NO: 1889025
ugcugaauuccugacccuu

SEQ ID NO: 2574129 - RNA, 19 nt, Artificial Sequence
  Description of Artificial Sequence: Synthetic oligonucleotide
  Antisense strand to SEQ ID NO: 2574128
aagggucaggaauucagca

SEQ ID NO: 2574130 - RNA, 19 nt, Artificial Sequence
  Description of Artificial Sequence: Synthetic oligonucleotide
  Sense strand starting at position 2158 of SEQ ID NO: 1889025
ggcugugugaguguuugca

SEQ ID NO: 2574131 - RNA, 19 nt, Artificial Sequence
  Description of Artificial Sequence: Synthetic oligonucleotide
  Antisense strand to SEQ ID NO: 2574130
ugcaaacacucacacagcc

SEQ ID NO: 2574132 - RNA, 19 nt, Artificial Sequence
  Description of Artificial Sequence: Synthetic oligonucleotide
  Sense strand starting at position 2198 of SEQ ID NO: 1889025
aggugagcuuuggccagaa

SEQ ID NO: 2574133 - RNA, 19 nt, Artificial Sequence
  Description of Artificial Sequence: Synthetic oligonucleotide
  Antisense strand to SEQ ID NO: 2574132
uucuggccaaagcucaccu

SEQ ID NO: 2574134 - RNA, 19 nt, Artificial Sequence
  Description of Artificial Sequence: Synthetic oligonucleotide
  Sense strand starting at position 2200 of SEQ ID NO: 1889025
gugagcuuuggccagaaau

SEQ ID NO: 2574135 - RNA, 19 nt, Artificial Sequence
  Description of Artificial Sequence: Synthetic oligonucleotide
  Antisense strand to SEQ ID NO: 2574134
auuucuggccaaagcucac

SEQ ID NO: 2574136 - RNA, 19 nt, Artificial Sequence
  Description of Artificial Sequence: Synthetic oligonucleotide
  Sense strand starting at position 2202 of SEQ ID NO: 1889025
gagcuuuggccagaaauuc

SEQ ID NO: 2574137 - RNA, 19 nt, Artificial Sequence
  Description of Artificial Sequence: Synthetic oligonucleotide
  Antisense strand to SEQ ID NO: 2574136
gaauuucuggccaaagcuc

SEQ ID NO: 2574138 - RNA, 19 nt, Artificial Sequence
  Description of Artificial Sequence: Synthetic oligonucleotide
  Sense strand starting at position 2322 of SEQ ID NO: 1889025
gcugcaggguaguuaugaa

SEQ ID NO: 2574139 - RNA, 19 nt, Artificial Sequence
  Description of Artificial Sequence: Synthetic oligonucleotide
  Antisense strand to SEQ ID NO: 2574138
uucauaacuacccugcagc

SEQ ID NO: 2574140 - RNA, 19 nt, Artificial Sequence
  Description of Artificial Sequence: Synthetic oligonucleotide
  Sense strand starting at position 2394 of SEQ ID NO: 1889025
gcuaccauucuaugucauu

SEQ ID NO: 2574141 - RNA, 19 nt, Artificial Sequence
  Description of Artificial Sequence: Synthetic oligonucleotide
  Antisense strand to SEQ ID NO: 2574140
aaugacauagaaugguagc

SEQ ID NO: 2574142 - RNA, 19 nt, Artificial Sequence
  Description of Artificial Sequence: Synthetic oligonucleotide
  Sense strand starting at position 2435 of SEQ ID NO: 1889025
ugaagcucuaguuagcaga

SEQ ID NO: 2574143 - RNA, 19 nt, Artificial Sequence
  Description of Artificial Sequence: Synthetic oligonucleotide
  Antisense strand to SEQ ID NO: 2574142
ucugcuaacuagagcuuca

SEQ ID NO: 2574144 - RNA, 19 nt, Artificial Sequence
  Description of Artificial Sequence: Synthetic oligonucleotide
  Sense strand starting at position 2437 of SEQ ID NO: 1889025
aagcucuaguuagcagaau

SEQ ID NO: 2574145 - RNA, 19 nt, Artificial Sequence
  Description of Artificial Sequence: Synthetic oligonucleotide
  Antisense strand to SEQ ID NO: 2574144
auucugcuaacuagagcuu

SEQ ID NO: 2574146 - RNA, 19 nt, Artificial Sequence
  Description of Artificial Sequence: Synthetic oligonucleotide
  Sense strand starting at position 2511 of SEQ ID NO: 1889025
cuguguaacccugaccaaa

SEQ ID NO: 2574147 - RNA, 19 nt, Artificial Sequence
  Description of Artificial Sequence: Synthetic oligonucleotide
  Antisense strand to SEQ ID NO: 2574146
uuuggucaggguuacacag

SEQ ID NO: 2574148 - RNA, 19 nt, Artificial Sequence
  Description of Artificial Sequence: Synthetic oligonucleotide
  Sense strand starting at position 2513 of SEQ ID NO: 1889025
guguaacccugaccaaaug

SEQ ID NO: 2574149 - RNA, 19 nt, Artificial Sequence
  Description of Artificial Sequence: Synthetic oligonucleotide
  Antisense strand to SEQ ID NO: 2574148
cauuuggucaggguuacac

SEQ ID NO: 2574150 - RNA, 19 nt, Artificial Sequence
  Description of Artificial Sequence: Synthetic oligonucleotide
  Sense strand starting at position 2556 of SEQ ID NO: 1889025
ucugcauacguacaaugau

SEQ ID NO: 2574151 - RNA, 19 nt, Artificial Sequence
  Description of Artificial Sequence: Synthetic oligonucleotide
  Antisense strand to SEQ ID NO: 2574150
aucauuguacguaugcaga

SEQ ID NO: 2574152 - RNA, 19 nt, Artificial Sequence
  Description of Artificial Sequence: Synthetic oligonucleotide
  Sense strand starting at position 2616 of SEQ ID NO: 1889025
aauguugagguauauguaa

SEQ ID NO: 2574153 - RNA, 19 nt, Artificial Sequence
  Description of Artificial Sequence: Synthetic oligonucleotide
  Antisense strand to SEQ ID NO: 2574152
uuacauauaccucaacauu

SEQ ID NO: 2574154 - RNA, 19 nt, Artificial Sequence
  Description of Artificial Sequence: Synthetic oligonucleotide
  Sense strand starting at position 2618 of SEQ ID NO: 1889025
uguugagguauauguaaca

SEQ ID NO: 2574155 - RNA, 19 nt, Artificial Sequence
  Description of Artificial Sequence: Synthetic oligonucleotide
  Antisense strand to SEQ ID NO: 2574154
uguuacauauaccucaaca

SEQ ID NO: 2574156 - RNA, 19 nt, Artificial Sequence
  Description of Artificial Sequence: Synthetic oligonucleotide
  Sense strand starting at position 2754 of SEQ ID NO: 1889025
cuuuaucacucaguucuga

SEQ ID NO: 2574157 - RNA, 19 nt, Artificial Sequence
  Description of Artificial Sequence: Synthetic oligonucleotide
  Antisense strand to SEQ ID NO: 2574156
ucagaacugagugauaaag

SEQ ID NO: 2574158 - RNA, 19 nt, Artificial Sequence
  Description of Artificial Sequence: Synthetic oligonucleotide
  Sense strand starting at position 2778 of SEQ ID NO: 1889025
gccaaaugcaugggacaca

SEQ ID NO: 2574159 - RNA, 19 nt, Artificial Sequence
  Description of Artificial Sequence: Synthetic oligonucleotide
  Antisense strand to SEQ ID NO: 2574158
ugugucccaugcauuuggc

SEQ ID NO: 2574160 - RNA, 19 nt, Artificial Sequence
  Description of Artificial Sequence: Synthetic oligonucleotide
  Sense strand starting at position 2868 of SEQ ID NO: 1889025
gagugaaugauguauccug

SEQ ID NO: 2574161 - RNA, 19 nt, Artificial Sequence
  Description of Artificial Sequence: Synthetic oligonucleotide
  Antisense strand to SEQ ID NO: 2574160
caggauacaucauucacuc

SEQ ID NO: 2574162 - RNA, 19 nt, Artificial Sequence
  Description of Artificial Sequence: Synthetic oligonucleotide
  Sense strand starting at position 2876 of SEQ ID NO: 1889025
gauguauccugagagaaga

SEQ ID NO: 2574163 - RNA, 19 nt, Artificial Sequence
  Description of Artificial Sequence: Synthetic oligonucleotide
  Antisense strand to SEQ ID NO: 2574162
ucuucucucaggauacauc

SEQ ID NO: 2574164 - RNA, 19 nt, Artificial Sequence
  Description of Artificial Sequence: Synthetic oligonucleotide
  Sense strand starting at position 3413 of SEQ ID NO: 1889025
gugaguccuuaguccuaga

SEQ ID NO: 2574165 - RNA, 19 nt, Artificial Sequence
  Description of Artificial Sequence: Synthetic oligonucleotide
  Antisense strand to SEQ ID NO: 2574164
ucuaggacuaaggacucac

SEQ ID NO: 2574166 - RNA, 19 nt, Artificial Sequence
  Description of Artificial Sequence: Synthetic oligonucleotide
  Sense strand starting at position 3442 of SEQ ID NO: 1889025
gacagagagguuuauguuc

SEQ ID NO: 2574167 - RNA, 19 nt, Artificial Sequence
  Description of Artificial Sequence: Synthetic oligonucleotide
  Antisense strand to SEQ ID NO: 2574166
gaacauaaaccucucuguc

SEQ ID NO: 2574168 - RNA, 19 nt, Artificial Sequence
  Description of Artificial Sequence: Synthetic oligonucleotide
  Sense strand starting at position 3796 of SEQ ID NO: 1889025
ugagaaccacucugccaaa

SEQ ID NO: 2574169 - RNA, 19 nt, Artificial Sequence
  Description of Artificial Sequence: Synthetic oligonucleotide
  Antisense strand to SEQ ID NO: 2574168
uuuggcagagugguucuca

SEQ ID NO: 2574170 - RNA, 19 nt, Artificial Sequence
  Description of Artificial Sequence: Synthetic oligonucleotide
  Sense strand starting at position 324 of SEQ ID NO: 1889026
uuuggaagcuccuuaagaa

SEQ ID NO: 2574171 - RNA, 19 nt, Artificial Sequence
  Description of Artificial Sequence: Synthetic oligonucleotide
  Antisense strand to SEQ ID NO: 2574170
uucuuaaggagcuuccaaa

SEQ ID NO: 2574172 - RNA, 19 nt, Artificial Sequence
  Description of Artificial Sequence: Synthetic oligonucleotide
  Sense strand starting at position 350 of SEQ ID NO: 1889026
agcaguuugaggcacagau

SEQ ID NO: 2574173 - RNA, 19 nt, Artificial Sequence
  Description of Artificial Sequence: Synthetic oligonucleotide
  Antisense strand to SEQ ID NO: 2574172
aucugugccucaaacugcu

SEQ ID NO: 2574174 - RNA, 19 nt, Artificial Sequence
  Description of Artificial Sequence: Synthetic oligonucleotide
  Sense strand starting at position 416 of SEQ ID NO: 1889026
gaucccuguugggaacaau

SEQ ID NO: 2574175 - RNA, 19 nt, Artificial Sequence
  Description of Artificial Sequence: Synthetic oligonucleotide
  Antisense strand to SEQ ID NO: 2574174
auuguucccaacagggauc

SEQ ID NO: 2574176 - RNA, 19 nt, Artificial Sequence
  Description of Artificial Sequence: Synthetic oligonucleotide
  Sense strand starting at position 447 of SEQ ID NO: 1889026
ucuagucaucuggauauug

SEQ ID NO: 2574177 - RNA, 19 nt, Artificial Sequence
  Description of Artificial Sequence: Synthetic oligonucleotide
  Antisense strand to SEQ ID NO: 2574176
caauauccagaugacuaga

SEQ ID NO: 2574178 - RNA, 19 nt, Artificial Sequence
  Description of Artificial Sequence: Synthetic oligonucleotide
  Sense strand starting at position 456 of SEQ ID NO: 1889026
cuggauauugacuagcacu

SEQ ID NO: 2574179 - RNA, 19 nt, Artificial Sequence
  Description of Artificial Sequence: Synthetic oligonucleotide
  Antisense strand to SEQ ID NO: 2574178
agugcuagucaauauccag

SEQ ID NO: 2574180 - RNA, 19 nt, Artificial Sequence
  Description of Artificial Sequence: Synthetic oligonucleotide
  Sense strand starting at position 498 of SEQ ID NO: 1889026
cacacaggcuucuuugaga

SEQ ID NO: 2574181 - RNA, 19 nt, Artificial Sequence
  Description of Artificial Sequence: Synthetic oligonucleotide
  Antisense strand to SEQ ID NO: 2574180
ucucaaagaagccugugug

SEQ ID NO: 2574182 - RNA, 19 nt, Artificial Sequence
  Description of Artificial Sequence: Synthetic oligonucleotide
  Sense strand starting at position 501 of SEQ ID NO: 1889026
acaggcuucuuugagaaua

SEQ ID NO: 2574183 - RNA, 19 nt, Artificial Sequence
  Description of Artificial Sequence: Synthetic oligonucleotide
  Antisense strand to SEQ ID NO: 2574182
uauucucaaagaagccugu

SEQ ID NO: 2574184 - RNA, 19 nt, Artificial Sequence
  Description of Artificial Sequence: Synthetic oligonucleotide
  Sense strand starting at position 503 of SEQ ID NO: 1889026
aggcuucuuugagaauaaa

SEQ ID NO: 2574185 - RNA, 19 nt, Artificial Sequence
  Description of Artificial Sequence: Synthetic oligonucleotide
  Antisense strand to SEQ ID NO: 2574184
uuuauucucaaagaagccu

SEQ ID NO: 2574186 - RNA, 19 nt, Artificial Sequence
  Description of Artificial Sequence: Synthetic oligonucleotide
  Sense strand starting at position 642 of SEQ ID NO: 1889026
ucaagaggaugguaaagau

SEQ ID NO: 2574187 - RNA, 19 nt, Artificial Sequence
  Description of Artificial Sequence: Synthetic oligonucleotide
  Antisense strand to SEQ ID NO: 2574186
aucuuuaccauccucuuga

SEQ ID NO: 2574188 - RNA, 19 nt, Artificial Sequence
  Description of Artificial Sequence: Synthetic oligonucleotide
  Sense strand starting at position 686 of SEQ ID NO: 1889026
cucagugguagcgagacaa

SEQ ID NO: 2574189 - RNA, 19 nt, Artificial Sequence
  Description of Artificial Sequence: Synthetic oligonucleotide
  Antisense strand to SEQ ID NO: 2574188
uugucucgcuaccacugag

SEQ ID NO: 2574190 - RNA, 19 nt, Artificial Sequence
  Description of Artificial Sequence: Synthetic oligonucleotide
  Sense strand starting at position 1190 of SEQ ID NO: 1889026
ggaagaucugcuugagcuu

SEQ ID NO: 2574191 - RNA, 19 nt, Artificial Sequence
  Description of Artificial Sequence: Synthetic oligonucleotide
  Antisense strand to SEQ ID NO: 2574190
aagcucaagcagaucuucc

SEQ ID NO: 2574192 - RNA, 19 nt, Artificial Sequence
  Description of Artificial Sequence: Synthetic oligonucleotide
  Sense strand starting at position 1196 of SEQ ID NO: 1889026
ucugcuugagcuugggaga

SEQ ID NO: 2574193 - RNA, 19 nt, Artificial Sequence
  Description of Artificial Sequence: Synthetic oligonucleotide
  Antisense strand to SEQ ID NO: 2574192
ucucccaagcucaagcaga

SEQ ID NO: 2574194 - RNA, 19 nt, Artificial Sequence
  Description of Artificial Sequence: Synthetic oligonucleotide
  Sense strand starting at position 1503 of SEQ ID NO: 1889026
cacuuaugacaagguugua

SEQ ID NO: 2574195 - RNA, 19 nt, Artificial Sequence
  Description of Artificial Sequence: Synthetic oligonucleotide
  Antisense strand to SEQ ID NO: 2574194
uacaaccuugucauaagug

SEQ ID NO: 2574196 - RNA, 19 nt, Artificial Sequence
  Description of Artificial Sequence: Synthetic oligonucleotide
  Sense strand starting at position 1506 of SEQ ID NO: 1889026
uuaugacaagguuguaauu

SEQ ID NO: 2574197 - RNA, 19 nt, Artificial Sequence
  Description of Artificial Sequence: Synthetic oligonucleotide
  Antisense strand to SEQ ID NO: 2574196
aauuacaaccuugucauaa

SEQ ID NO: 2574198 - RNA, 19 nt, Artificial Sequence
  Description of Artificial Sequence: Synthetic oligonucleotide
  Sense strand starting at position 1508 of SEQ ID NO: 1889026
augacaagguuguaauuga

SEQ ID NO: 2574199 - RNA, 19 nt, Artificial Sequence
  Description of Artificial Sequence: Synthetic oligonucleotide
  Antisense strand to SEQ ID NO: 2574198
ucaauuacaaccuugucau

SEQ ID NO: 2574200 - RNA, 19 nt, Artificial Sequence
  Description of Artificial Sequence: Synthetic oligonucleotide
  Sense strand starting at position 1829 of SEQ ID NO: 1889026
uuuccaucauccguaugaa

SEQ ID NO: 2574201 - RNA, 19 nt, Artificial Sequence
  Description of Artificial Sequence: Synthetic oligonucleotide
  Antisense strand to SEQ ID NO: 2574200
uucauacggaugauggaaa

SEQ ID NO: 2574202 - RNA, 19 nt, Artificial Sequence
  Description of Artificial Sequence: Synthetic oligonucleotide
  Sense strand starting at position 1830 of SEQ ID NO: 1889026
uuccaucauccguaugaag

SEQ ID NO: 2574203 - RNA, 19 nt, Artificial Sequence
  Description of Artificial Sequence: Synthetic oligonucleotide
  Antisense strand to SEQ ID NO: 2574202
cuucauacggaugauggaa

SEQ ID NO: 2574204 - RNA, 19 nt, Artificial Sequence
  Description of Artificial Sequence: Synthetic oligonucleotide
  Sense strand starting at position 1833 of SEQ ID NO: 1889026
caucauccguaugaagauu

SEQ ID NO: 2574205 - RNA, 19 nt, Artificial Sequence
  Description of Artificial Sequence: Synthetic oligonucleotide
  Antisense strand to SEQ ID NO: 2574204
aaucuucauacggaugaug

SEQ ID NO: 2574206 - RNA, 19 nt, Artificial Sequence
  Description of Artificial Sequence: Synthetic oligonucleotide
  Sense strand starting at position 2005 of SEQ ID NO: 1889026
aggauuucuugacacucaa

SEQ ID NO: 2574207 - RNA, 19 nt, Artificial Sequence
  Description of Artificial Sequence: Synthetic oligonucleotide
  Antisense strand to SEQ ID NO: 2574206
uugagugucaagaaauccu

SEQ ID NO: 2574208 - RNA, 19 nt, Artificial Sequence
  Description of Artificial Sequence: Synthetic oligonucleotide
  Sense strand starting at position 2225 of SEQ ID NO: 1889026
gguggaagacucugacuca

SEQ ID NO: 2574209 - RNA, 19 nt, Artificial Sequence
  Description of Artificial Sequence: Synthetic oligonucleotide
  Antisense strand to SEQ ID NO: 2574208
ugagucagagucuuccacc

SEQ ID NO: 2574210 - RNA, 19 nt, Artificial Sequence
  Description of Artificial Sequence: Synthetic oligonucleotide
  Sense strand starting at position 2226 of SEQ ID NO: 1889026
guggaagacucugacucaa

SEQ ID NO: 2574211 - RNA, 19 nt, Artificial Sequence
  Description of Artificial Sequence: Synthetic oligonucleotide
  Antisense strand to SEQ ID NO: 2574210
uugagucagagucuuccac

SEQ ID NO: 2574212 - RNA, 19 nt, Artificial Sequence
  Description of Artificial Sequence: Synthetic oligonucleotide
  Sense strand starting at position 2627 of SEQ ID NO: 1889026
guagaagcauuguaauucu

SEQ ID NO: 2574213 - RNA, 19 nt, Artificial Sequence
  Description of Artificial Sequence: Synthetic oligonucleotide
  Antisense strand to SEQ ID NO: 2574212
agaauuacaaugcuucuac

SEQ ID NO: 2574214 - RNA, 19 nt, Artificial Sequence
  Description of Artificial Sequence: Synthetic oligonucleotide
  Sense strand starting at position 3011 of SEQ ID NO: 1889026
gcccgacugaggcauugua

SEQ ID NO: 2574215 - RNA, 19 nt, Artificial Sequence
  Description of Artificial Sequence: Synthetic oligonucleotide
  Antisense strand to SEQ ID NO: 2574214
uacaaugccucagucgggc

SEQ ID NO: 2574216 - RNA, 19 nt, Artificial Sequence
  Description of Artificial Sequence: Synthetic oligonucleotide
  Sense strand starting at position 3019 of SEQ ID NO: 1889026
gaggcauuguaauucuuga

SEQ ID NO: 2574217 - RNA, 19 nt, Artificial Sequence
  Description of Artificial Sequence: Synthetic oligonucleotide
  Antisense strand to SEQ ID NO: 2574216
ucaagaauuacaaugccuc

SEQ ID NO: 2574218 - RNA, 19 nt, Artificial Sequence
  Description of Artificial Sequence: Synthetic oligonucleotide
  Sense strand starting at position 3024 of SEQ ID NO: 1889026
auuguaauucuugauugca

SEQ ID NO: 2574219 - RNA, 19 nt, Artificial Sequence
  Description of Artificial Sequence: Synthetic oligonucleotide
  Antisense strand to SEQ ID NO: 2574218
ugcaaucaagaauuacaau

SEQ ID NO: 2574220 - RNA, 19 nt, Artificial Sequence
  Description of Artificial Sequence: Synthetic oligonucleotide
  Sense strand starting at position 3051 of SEQ ID NO: 1889026
ucugcugugucuuccuaga

SEQ ID NO: 2574221 - RNA, 19 nt, Artificial Sequence
  Description of Artificial Sequence: Synthetic oligonucleotide
  Antisense strand to SEQ ID NO: 2574220
ucuaggaagacacagcaga

SEQ ID NO: 2574222 - RNA, 19 nt, Artificial Sequence
  Description of Artificial Sequence: Synthetic oligonucleotide
  Sense strand starting at position 3053 of SEQ ID NO: 1889026
ugcugugucuuccuagaau

SEQ ID NO: 2574223 - RNA, 19 nt, Artificial Sequence
  Description of Artificial Sequence: Synthetic oligonucleotide
  Antisense strand to SEQ ID NO: 2574222
auucuaggaagacacagca

SEQ ID NO: 2574224 - RNA, 19 nt, Artificial Sequence
  Description of Artificial Sequence: Synthetic oligonucleotide
  Sense strand starting at position 3056 of SEQ ID NO: 1889026
ugugucuuccuagaauaua

SEQ ID NO: 2574225 - RNA, 19 nt, Artificial Sequence
  Description of Artificial Sequence: Synthetic oligonucleotide
  Antisense strand to SEQ ID NO: 2574224
uauauucuaggaagacaca

SEQ ID NO: 2574226 - RNA, 19 nt, Artificial Sequence
  Description of Artificial Sequence: Synthetic oligonucleotide
  Sense strand starting at position 3581 of SEQ ID NO: 1889026
gacgaaaucgcuugaagag

SEQ ID NO: 2574227 - RNA, 19 nt, Artificial Sequence
  Description of Artificial Sequence: Synthetic oligonucleotide
  Antisense strand to SEQ ID NO: 2574226
cucuucaagcgauuucguc

SEQ ID NO: 2574228 - RNA, 19 nt, Artificial Sequence
  Description of Artificial Sequence: Synthetic oligonucleotide
  Sense strand starting at position 3582 of SEQ ID NO: 1889026
acgaaaucgcuugaagaga

SEQ ID NO: 2574229 - RNA, 19 nt, Artificial Sequence
  Description of Artificial Sequence: Synthetic oligonucleotide
  Antisense strand to SEQ ID NO: 2574228
ucucuucaagcgauuucgu

SEQ ID NO: 2574230 - RNA, 19 nt, Artificial Sequence
  Description of Artificial Sequence: Synthetic oligonucleotide
  Sense strand starting at position 3708 of SEQ ID NO: 1889026
ucaguaggcucaguaggau

SEQ ID NO: 2574231 - RNA, 19 nt, Artificial Sequence
  Description of Artificial Sequence: Synthetic oligonucleotide
  Antisense strand to SEQ ID NO: 2574230
auccuacugagccuacuga

SEQ ID NO: 2574232 - RNA, 19 nt, Artificial Sequence
  Description of Artificial Sequence: Synthetic oligonucleotide
  Sense strand starting at position 3721 of SEQ ID NO: 1889026
uaggauugcugacaggcau

SEQ ID NO: 2574233 - RNA, 19 nt, Artificial Sequence
  Description of Artificial Sequence: Synthetic oligonucleotide
  Antisense strand to SEQ ID NO: 2574232
augccugucagcaauccua

SEQ ID NO: 2574234 - RNA, 19 nt, Artificial Sequence
  Description of Artificial Sequence: Synthetic oligonucleotide
  Sense strand starting at position 3734 of SEQ ID NO: 1889026
aggcaugccuacuuucuaa

SEQ ID NO: 2574235 - RNA, 19 nt, Artificial Sequence
  Description of Artificial Sequence: Synthetic oligonucleotide
  Antisense strand to SEQ ID NO: 2574234
uuagaaaguaggcaugccu

SEQ ID NO: 2574236 - RNA, 19 nt, Artificial Sequence
  Description of Artificial Sequence: Synthetic oligonucleotide
  Sense strand starting at position 116 of SEQ ID NO: 1889027
ugagcaagguuuguagaaa

SEQ ID NO: 2574237 - RNA, 19 nt, Artificial Sequence
  Description of Artificial Sequence: Synthetic oligonucleotide
  Antisense strand to SEQ ID NO: 2574236
uuucuacaaaccuugcuca

SEQ ID NO: 2574238 - RNA, 19 nt, Artificial Sequence
  Description of Artificial Sequence: Synthetic oligonucleotide
  Sense strand starting at position 275 of SEQ ID NO: 1889027
ugaagaaguuuccuugcua

SEQ ID NO: 2574239 - RNA, 19 nt, Artificial Sequence
  Description of Artificial Sequence: Synthetic oligonucleotide
  Antisense strand to SEQ ID NO: 2574238
uagcaaggaaacuucuuca

SEQ ID NO: 2574240 - RNA, 19 nt, Artificial Sequence
  Description of Artificial Sequence: Synthetic oligonucleotide
  Sense strand starting at position 276 of SEQ ID NO: 1889027
gaagaaguuuccuugcuac

SEQ ID NO: 2574241 - RNA, 19 nt, Artificial Sequence
  Description of Artificial Sequence: Synthetic oligonucleotide
  Antisense strand to SEQ ID NO: 2574240
guagcaaggaaacuucuuc

SEQ ID NO: 2574242 - RNA, 19 nt, Artificial Sequence
  Description of Artificial Sequence: Synthetic oligonucleotide
  Sense strand starting at position 279 of SEQ ID NO: 1889027
gaaguuuccuugcuacaag

SEQ ID NO: 2574243 - RNA, 19 nt, Artificial Sequence
  Description of Artificial Sequence: Synthetic oligonucleotide
  Antisense strand to SEQ ID NO: 2574242
cuuguagcaaggaaacuuc

SEQ ID NO: 2574244 - RNA, 19 nt, Artificial Sequence
  Description of Artificial Sequence: Synthetic oligonucleotide
  Sense strand starting at position 490 of SEQ ID NO: 1889027
gugcugugucgagaaggaa

SEQ ID NO: 2574245 - RNA, 19 nt, Artificial Sequence
  Description of Artificial Sequence: Synthetic oligonucleotide
  Antisense strand to SEQ ID NO: 2574244
uuccuucucgacacagcac

SEQ ID NO: 2574246 - RNA, 19 nt, Artificial Sequence
  Description of Artificial Sequence: Synthetic oligonucleotide
  Sense strand starting at position 526 of SEQ ID NO: 1889027
uggcuuggccaguaagauc

SEQ ID NO: 2574247 - RNA, 19 nt, Artificial Sequence
  Description of Artificial Sequence: Synthetic oligonucleotide
  Antisense strand to SEQ ID NO: 2574246
gaucuuacuggccaagcca

SEQ ID NO: 2574248 - RNA, 19 nt, Artificial Sequence
  Description of Artificial Sequence: Synthetic oligonucleotide
  Sense strand starting at position 638 of SEQ ID NO: 1889027
aaauaaguguccguccaug

SEQ ID NO: 2574249 - RNA, 19 nt, Artificial Sequence
  Description of Artificial Sequence: Synthetic oligonucleotide
  Antisense strand to SEQ ID NO: 2574248
cauggacggacacuuauuu

SEQ ID NO: 2574250 - RNA, 19 nt, Artificial Sequence
  Description of Artificial Sequence: Synthetic oligonucleotide
  Sense strand starting at position 728 of SEQ ID NO: 1889027
ugcagagucucauuucucu

SEQ ID NO: 2574251 - RNA, 19 nt, Artificial Sequence
  Description of Artificial Sequence: Synthetic oligonucleotide
  Antisense strand to SEQ ID NO: 2574250
agagaaaugagacucugca

SEQ ID NO: 2574252 - RNA, 19 nt, Artificial Sequence
  Description of Artificial Sequence: Synthetic oligonucleotide
  Sense strand starting at position 748 of SEQ ID NO: 1889027
ccgaaacucuuacuggauc

SEQ ID NO: 2574253 - RNA, 19 nt, Artificial Sequence
  Description of Artificial Sequence: Synthetic oligonucleotide
  Antisense strand to SEQ ID NO: 2574252
gauccaguaagaguuucgg

SEQ ID NO: 2574254 - RNA, 19 nt, Artificial Sequence
  Description of Artificial Sequence: Synthetic oligonucleotide
  Sense strand starting at position 795 of SEQ ID NO: 1889027
cagcauuucugguccggau

SEQ ID NO: 2574255 - RNA, 19 nt, Artificial Sequence
  Description of Artificial Sequence: Synthetic oligonucleotide
  Antisense strand to SEQ ID NO: 2574254
auccggaccagaaaugcug

SEQ ID NO: 2574256 - RNA, 19 nt, Artificial Sequence
  Description of Artificial Sequence: Synthetic oligonucleotide
  Sense strand starting at position 924 of SEQ ID NO: 1889027
gaauguacugaugguaucu

SEQ ID NO: 2574257 - RNA, 19 nt, Artificial Sequence
  Description of Artificial Sequence: Synthetic oligonucleotide
  Antisense strand to SEQ ID NO: 2574256
agauaccaucaguacauuc

SEQ ID NO: 2574258 - RNA, 19 nt, Artificial Sequence
  Description of Artificial Sequence: Synthetic oligonucleotide
  Sense strand starting at position 933 of SEQ ID NO: 1889027
gaugguaucuggcccagaa

SEQ ID NO: 2574259 - RNA, 19 nt, Artificial Sequence
  Description of Artificial Sequence: Synthetic oligonucleotide
  Antisense strand to SEQ ID NO: 2574258
uucugggccagauaccauc

SEQ ID NO: 2574260 - RNA, 19 nt, Artificial Sequence
  Description of Artificial Sequence: Synthetic oligonucleotide
  Sense strand starting at position 1104 of SEQ ID NO: 1889027
cggccauauccacauccau

SEQ ID NO: 2574261 - RNA, 19 nt, Artificial Sequence
  Description of Artificial Sequence: Synthetic oligonucleotide
  Antisense strand to SEQ ID NO: 2574260
auggauguggauauggccg

SEQ ID NO: 2574262 - RNA, 19 nt, Artificial Sequence
  Description of Artificial Sequence: Synthetic oligonucleotide
  Sense strand starting at position 1383 of SEQ ID NO: 1889027
ggugccucugugaguguuu

SEQ ID NO: 2574263 - RNA, 19 nt, Artificial Sequence
  Description of Artificial Sequence: Synthetic oligonucleotide
  Antisense strand to SEQ ID NO: 2574262
aaacacucacagaggcacc

SEQ ID NO: 2574264 - RNA, 19 nt, Artificial Sequence
  Description of Artificial Sequence: Synthetic oligonucleotide
  Sense strand starting at position 1400 of SEQ ID NO: 1889027
uugguacccucacuggaau

SEQ ID NO: 2574265 - RNA, 19 nt, Artificial Sequence
  Description of Artificial Sequence: Synthetic oligonucleotide
  Antisense strand to SEQ ID NO: 2574264
auuccagugaggguaccaa

SEQ ID NO: 2574266 - RNA, 19 nt, Artificial Sequence
  Description of Artificial Sequence: Synthetic oligonucleotide
  Sense strand starting at position 1401 of SEQ ID NO: 1889027
ugguacccucacuggaaua

SEQ ID NO: 2574267 - RNA, 19 nt, Artificial Sequence
  Description of Artificial Sequence: Synthetic oligonucleotide
  Antisense strand to SEQ ID NO: 2574266
uauuccagugaggguacca

SEQ ID NO: 2574268 - RNA, 19 nt, Artificial Sequence
  Description of Artificial Sequence: Synthetic oligonucleotide
  Sense strand starting at position 1508 of SEQ ID NO: 1889027
ccuuaccugggcgaugaau

SEQ ID NO: 2574269 - RNA, 19 nt, Artificial Sequence
  Description of Artificial Sequence: Synthetic oligonucleotide
  Antisense strand to SEQ ID NO: 2574268
auucaucgcccagguaagg

SEQ ID NO: 2574270 - RNA, 19 nt, Artificial Sequence
  Description of Artificial Sequence: Synthetic oligonucleotide
  Sense strand starting at position 1612 of SEQ ID NO: 1889027
ucuuguauuccagguaccu

SEQ ID NO: 2574271 - RNA, 19 nt, Artificial Sequence
  Description of Artificial Sequence: Synthetic oligonucleotide
  Antisense strand to SEQ ID NO: 2574270
agguaccuggaauacaaga

SEQ ID NO: 2574272 - RNA, 19 nt, Artificial Sequence
  Description of Artificial Sequence: Synthetic oligonucleotide
  Sense strand starting at position 1883 of SEQ ID NO: 1889027
gcauuugucuguagggagg

SEQ ID NO: 2574273 - RNA, 19 nt, Artificial Sequence
  Description of Artificial Sequence: Synthetic oligonucleotide
  Antisense strand to SEQ ID NO: 2574272
ccucccuacagacaaaugc

SEQ ID NO: 2574274 - RNA, 19 nt, Artificial Sequence
  Description of Artificial Sequence: Synthetic oligonucleotide
  Sense strand starting at position 2271 of SEQ ID NO: 1889027
cggguuccuuagguguaaa

SEQ ID NO: 2574275 - RNA, 19 nt, Artificial Sequence
  Description of Artificial Sequence: Synthetic oligonucleotide
  Antisense strand to SEQ ID NO: 2574274
uuuacaccuaaggaacccg

SEQ ID NO: 2574276 - RNA, 19 nt, Artificial Sequence
  Description of Artificial Sequence: Synthetic oligonucleotide
  Sense strand starting at position 2272 of SEQ ID NO: 1889027
ggguuccuuagguguaaac

SEQ ID NO: 2574277 - RNA, 19 nt, Artificial Sequence
  Description of Artificial Sequence: Synthetic oligonucleotide
  Antisense strand to SEQ ID NO: 2574276
guuuacaccuaaggaaccc

SEQ ID NO: 2574278 - RNA, 19 nt, Artificial Sequence
  Description of Artificial Sequence: Synthetic oligonucleotide
  Sense strand starting at position 2274 of SEQ ID NO: 1889027
guuccuuagguguaaacca

SEQ ID NO: 2574279 - RNA, 19 nt, Artificial Sequence
  Description of Artificial Sequence: Synthetic oligonucleotide
  Antisense strand to SEQ ID NO: 2574278
ugguuuacaccuaaggaac

SEQ ID NO: 2574280 - RNA, 19 nt, Artificial Sequence
  Description of Artificial Sequence: Synthetic oligonucleotide
  Sense strand starting at position 2299 of SEQ ID NO: 1889027
acucuugugucagucuaca

SEQ ID NO: 2574281 - RNA, 19 nt, Artificial Sequence
  Description of Artificial Sequence: Synthetic oligonucleotide
  Antisense strand to SEQ ID NO: 2574280
uguagacugacacaagagu

SEQ ID NO: 2574282 - RNA, 19 nt, Artificial Sequence
  Description of Artificial Sequence: Synthetic oligonucleotide
  Sense strand starting at position 2553 of SEQ ID NO: 1889027
guuagcucaggugauacuu

SEQ ID NO: 2574283 - RNA, 19 nt, Artificial Sequence
  Description of Artificial Sequence: Synthetic oligonucleotide
  Antisense strand to SEQ ID NO: 2574282
aaguaucaccugagcuaac

SEQ ID NO: 2574284 - RNA, 19 nt, Artificial Sequence
  Description of Artificial Sequence: Synthetic oligonucleotide
  Sense strand starting at position 2584 of SEQ ID NO: 1889027
caaagucaucugugaugag

SEQ ID NO: 2574285 - RNA, 19 nt, Artificial Sequence
  Description of Artificial Sequence: Synthetic oligonucleotide
  Antisense strand to SEQ ID NO: 2574284
cucaucacagaugacuuug

SEQ ID NO: 2574286 - RNA, 19 nt, Artificial Sequence
  Description of Artificial Sequence: Synthetic oligonucleotide
  Sense strand starting at position 2596 of SEQ ID NO: 1889027
ugaugagcuuccucagauc

SEQ ID NO: 2574287 - RNA, 19 nt, Artificial Sequence
  Description of Artificial Sequence: Synthetic oligonucleotide
  Antisense strand to SEQ ID NO: 2574286
gaucugaggaagcucauca

SEQ ID NO: 2574288 - RNA, 19 nt, Artificial Sequence
  Description of Artificial Sequence: Synthetic oligonucleotide
  Sense strand starting at position 2756 of SEQ ID NO: 1889027
gaggacuguuggucaggga

SEQ ID NO: 2574289 - RNA, 19 nt, Artificial Sequence
  Description of Artificial Sequence: Synthetic oligonucleotide
  Antisense strand to SEQ ID NO: 2574288
ucccugaccaacaguccuc

SEQ ID NO: 2574290 - RNA, 19 nt, Artificial Sequence
  Description of Artificial Sequence: Synthetic oligonucleotide
  Sense strand starting at position 2809 of SEQ ID NO: 1889027
cugacugucucucuuagau

SEQ ID NO: 2574291 - RNA, 19 nt, Artificial Sequence
  Description of Artificial Sequence: Synthetic oligonucleotide
  Antisense strand to SEQ ID NO: 2574290
aucuaagagagacagucag

SEQ ID NO: 2574292 - RNA, 19 nt, Artificial Sequence
  Description of Artificial Sequence: Synthetic oligonucleotide
  Sense strand starting at position 2896 of SEQ ID NO: 1889027
ugagauccuuugcucucua

SEQ ID NO: 2574293 - RNA, 19 nt, Artificial Sequence
  Description of Artificial Sequence: Synthetic oligonucleotide
  Antisense strand to SEQ ID NO: 2574292
uagagagcaaaggaucuca

SEQ ID NO: 2574294 - RNA, 19 nt, Artificial Sequence
  Description of Artificial Sequence: Synthetic oligonucleotide
  Sense strand starting at position 2972 of SEQ ID NO: 1889027
gaccucuuuggccagagga

SEQ ID NO: 2574295 - RNA, 19 nt, Artificial Sequence
  Description of Artificial Sequence: Synthetic oligonucleotide
  Antisense strand to SEQ ID NO: 2574294
uccucuggccaaagagguc

SEQ ID NO: 2574296 - RNA, 19 nt, Artificial Sequence
  Description of Artificial Sequence: Synthetic oligonucleotide
  Sense strand starting at position 2974 of SEQ ID NO: 1889027
ccucuuuggccagaggaua

SEQ ID NO: 2574297 - RNA, 19 nt, Artificial Sequence
  Description of Artificial Sequence: Synthetic oligonucleotide
  Antisense strand to SEQ ID NO: 2574296
uauccucuggccaaagagg

SEQ ID NO: 2574298 - RNA, 19 nt, Artificial Sequence
  Description of Artificial Sequence: Synthetic oligonucleotide
  Sense strand starting at position 3220 of SEQ ID NO: 1889027
gggaguguccuugguucua

SEQ ID NO: 2574299 - RNA, 19 nt, Artificial Sequence
  Description of Artificial Sequence: Synthetic oligonucleotide
  Antisense strand to SEQ ID NO: 2574298
uagaaccaaggacacuccc

SEQ ID NO: 2574300 - RNA, 19 nt, Artificial Sequence
  Description of Artificial Sequence: Synthetic oligonucleotide
  Sense strand starting at position 3222 of SEQ ID NO: 1889027
gaguguccuugguucuaaa

SEQ ID NO: 2574301 - RNA, 19 nt, Artificial Sequence
  Description of Artificial Sequence: Synthetic oligonucleotide
  Antisense strand to SEQ ID NO: 2574300
uuuagaaccaaggacacuc

SEQ ID NO: 2574302 - RNA, 19 nt, Artificial Sequence
  Description of Artificial Sequence: Synthetic oligonucleotide
  Sense strand starting at position 3231 of SEQ ID NO: 1889027
ugguucuaaagguguggaa

SEQ ID NO: 2574303 - RNA, 19 nt, Artificial Sequence
  Description of Artificial Sequence: Synthetic oligonucleotide
  Antisense strand to SEQ ID NO: 2574302
uuccacaccuuuagaacca

SEQ ID NO: 2574304 - RNA, 19 nt, Artificial Sequence
  Description of Artificial Sequence: Synthetic oligonucleotide
  Sense strand starting at position 3233 of SEQ ID NO: 1889027
guucuaaagguguggaaag

SEQ ID NO: 2574305 - RNA, 19 nt, Artificial Sequence
  Description of Artificial Sequence: Synthetic oligonucleotide
  Antisense strand to SEQ ID NO: 2574304
cuuuccacaccuuuagaac

SEQ ID NO: 2574306 - RNA, 19 nt, Artificial Sequence
  Description of Artificial Sequence: Synthetic oligonucleotide
  Sense strand starting at position 3265 of SEQ ID NO: 1889027
agcagcuauuugccugaga

SEQ ID NO: 2574307 - RNA, 19 nt, Artificial Sequence
  Description of Artificial Sequence: Synthetic oligonucleotide
  Antisense strand to SEQ ID NO: 2574306
ucucaggcaaauagcugcu

SEQ ID NO: 2574308 - RNA, 19 nt, Artificial Sequence
  Description of Artificial Sequence: Synthetic oligonucleotide
  Sense strand starting at position 3266 of SEQ ID NO: 1889027
gcagcuauuugccugagag

SEQ ID NO: 2574309 - RNA, 19 nt, Artificial Sequence
  Description of Artificial Sequence: Synthetic oligonucleotide
  Antisense strand to SEQ ID NO: 2574308
cucucaggcaaauagcugc

SEQ ID NO: 2574310 - RNA, 19 nt, Artificial Sequence
  Description of Artificial Sequence: Synthetic oligonucleotide
  Sense strand starting at position 3334 of SEQ ID NO: 1889027
gggaacucuucccaggaca

SEQ ID NO: 2574311 - RNA, 19 nt, Artificial Sequence
  Description of Artificial Sequence: Synthetic oligonucleotide
  Antisense strand to SEQ ID NO: 2574310
uguccugggaagaguuccc

SEQ ID NO: 2574312 - RNA, 19 nt, Artificial Sequence
  Description of Artificial Sequence: Synthetic oligonucleotide
  Sense strand starting at position 3446 of SEQ ID NO: 1889027
caggguucugcagaggaca

SEQ ID NO: 2574313 - RNA, 19 nt, Artificial Sequence
  Description of Artificial Sequence: Synthetic oligonucleotide
  Antisense strand to SEQ ID NO: 2574312
uguccucugcagaacccug

SEQ ID NO: 2574314 - RNA, 19 nt, Artificial Sequence
  Description of Artificial Sequence: Synthetic oligonucleotide
  Sense strand starting at position 3885 of SEQ ID NO: 1889027
gugugcagacaagaauaua

SEQ ID NO: 2574315 - RNA, 19 nt, Artificial Sequence
  Description of Artificial Sequence: Synthetic oligonucleotide
  Antisense strand to SEQ ID NO: 2574314
uauauucuugucugcacac

SEQ ID NO: 2574316 - RNA, 19 nt, Artificial Sequence
  Description of Artificial Sequence: Synthetic oligonucleotide
  Sense strand starting at position 116 of SEQ ID NO: 1889028
cugagcaagguuuguagaa

SEQ ID NO: 2574317 - RNA, 19 nt, Artificial Sequence
  Description of Artificial Sequence: Synthetic oligonucleotide
  Antisense strand to SEQ ID NO: 2574316
uucuacaaaccuugcucag

SEQ ID NO: 2574318 - RNA, 19 nt, Artificial Sequence
  Description of Artificial Sequence: Synthetic oligonucleotide
  Sense strand starting at position 117 of SEQ ID NO: 1889028
ugagcaagguuuguagaaa

SEQ ID NO: 2574319 - RNA, 19 nt, Artificial Sequence
  Description of Artificial Sequence: Synthetic oligonucleotide
  Antisense strand to SEQ ID NO: 2574318
uuucuacaaaccuugcuca

SEQ ID NO: 2574320 - RNA, 19 nt, Artificial Sequence
  Description of Artificial Sequence: Synthetic oligonucleotide
  Sense strand starting at position 276 of SEQ ID NO: 1889028
ugaagaaguuuccuugcua

SEQ ID NO: 2574321 - RNA, 19 nt, Artificial Sequence
  Description of Artificial Sequence: Synthetic oligonucleotide
  Antisense strand to SEQ ID NO: 2574320
uagcaaggaaacuucuuca

SEQ ID NO: 2574322 - RNA, 19 nt, Artificial Sequence
  Description of Artificial Sequence: Synthetic oligonucleotide
  Sense strand starting at position 277 of SEQ ID NO: 1889028
gaagaaguuuccuugcuac

SEQ ID NO: 2574323 - RNA, 19 nt, Artificial Sequence
  Description of Artificial Sequence: Synthetic oligonucleotide
  Antisense strand to SEQ ID NO: 2574322
guagcaaggaaacuucuuc

SEQ ID NO: 2574324 - RNA, 19 nt, Artificial Sequence
  Description of Artificial Sequence: Synthetic oligonucleotide
  Sense strand starting at position 280 of SEQ ID NO: 1889028
gaaguuuccuugcuacaag

SEQ ID NO: 2574325 - RNA, 19 nt, Artificial Sequence
  Description of Artificial Sequence: Synthetic oligonucleotide
  Antisense strand to SEQ ID NO: 2574324
cuuguagcaaggaaacuuc

SEQ ID NO: 2574326 - RNA, 19 nt, Artificial Sequence
  Description of Artificial Sequence: Synthetic oligonucleotide
  Sense strand starting at position 555 of SEQ ID NO: 1889028
cgucaacggugccuauaaa

SEQ ID NO: 2574327 - RNA, 19 nt, Artificial Sequence
  Description of Artificial Sequence: Synthetic oligonucleotide
  Antisense strand to SEQ ID NO: 2574326
uuuauaggcaccguugacg

SEQ ID NO: 2574328 - RNA, 19 nt, Artificial Sequence
  Description of Artificial Sequence: Synthetic oligonucleotide
  Sense strand starting at position 639 of SEQ ID NO: 1889028
aaauaaguguccguccaug

SEQ ID NO: 2574329 - RNA, 19 nt, Artificial Sequence
  Description of Artificial Sequence: Synthetic oligonucleotide
  Antisense strand to SEQ ID NO: 2574328
cauggacggacacuuauuu

SEQ ID NO: 2574330 - RNA, 19 nt, Artificial Sequence
  Description of Artificial Sequence: Synthetic oligonucleotide
  Sense strand starting at position 729 of SEQ ID NO: 1889028
ugcagagucucauuucucu

SEQ ID NO: 2574331 - RNA, 19 nt, Artificial Sequence
  Description of Artificial Sequence: Synthetic oligonucleotide
  Antisense strand to SEQ ID NO: 2574330
agagaaaugagacucugca

SEQ ID NO: 2574332 - RNA, 19 nt, Artificial Sequence
  Description of Artificial Sequence: Synthetic oligonucleotide
  Sense strand starting at position 1185 of SEQ ID NO: 1889028
uucugauucugaggaggaa

SEQ ID NO: 2574333 - RNA, 19 nt, Artificial Sequence
  Description of Artificial Sequence: Synthetic oligonucleotide
  Antisense strand to SEQ ID NO: 2574332
uuccuccucagaaucagaa

SEQ ID NO: 2574334 - RNA, 19 nt, Artificial Sequence
  Description of Artificial Sequence: Synthetic oligonucleotide
  Sense strand starting at position 1268 of SEQ ID NO: 1889028
ucccgugugcuuugugcaa

SEQ ID NO: 2574335 - RNA, 19 nt, Artificial Sequence
  Description of Artificial Sequence: Synthetic oligonucleotide
  Antisense strand to SEQ ID NO: 2574334
uugcacaaagcacacggga

SEQ ID NO: 2574336 - RNA, 19 nt, Artificial Sequence
  Description of Artificial Sequence: Synthetic oligonucleotide
  Sense strand starting at position 1272 of SEQ ID NO: 1889028
gugugcuuugugcaaugau

SEQ ID NO: 2574337 - RNA, 19 nt, Artificial Sequence
  Description of Artificial Sequence: Synthetic oligonucleotide
  Antisense strand to SEQ ID NO: 2574336
aucauugcacaaagcacac

SEQ ID NO: 2574338 - RNA, 19 nt, Artificial Sequence
  Description of Artificial Sequence: Synthetic oligonucleotide
  Sense strand starting at position 1384 of SEQ ID NO: 1889028
ggugccucugugaguguuu

SEQ ID NO: 2574339 - RNA, 19 nt, Artificial Sequence
  Description of Artificial Sequence: Synthetic oligonucleotide
  Antisense strand to SEQ ID NO: 2574338
aaacacucacagaggcacc

SEQ ID NO: 2574340 - RNA, 19 nt, Artificial Sequence
  Description of Artificial Sequence: Synthetic oligonucleotide
  Sense strand starting at position 1401 of SEQ ID NO: 1889028
uugguacccucacuggaau

SEQ ID NO: 2574341 - RNA, 19 nt, Artificial Sequence
  Description of Artificial Sequence: Synthetic oligonucleotide
  Antisense strand to SEQ ID NO: 2574340
auuccagugaggguaccaa

SEQ ID NO: 2574342 - RNA, 19 nt, Artificial Sequence
  Description of Artificial Sequence: Synthetic oligonucleotide
  Sense strand starting at position 1402 of SEQ ID NO: 1889028
ugguacccucacuggaaua

SEQ ID NO: 2574343 - RNA, 19 nt, Artificial Sequence
  Description of Artificial Sequence: Synthetic oligonucleotide
  Antisense strand to SEQ ID NO: 2574342
uauuccagugaggguacca

SEQ ID NO: 2574344 - RNA, 19 nt, Artificial Sequence
  Description of Artificial Sequence: Synthetic oligonucleotide
  Sense strand starting at position 1509 of SEQ ID NO: 1889028
ccuuaccugggcgaugaau

SEQ ID NO: 2574345 - RNA, 19 nt, Artificial Sequence
  Description of Artificial Sequence: Synthetic oligonucleotide
  Antisense strand to SEQ ID NO: 2574344
auucaucgcccagguaagg

SEQ ID NO: 2574346 - RNA, 19 nt, Artificial Sequence
  Description of Artificial Sequence: Synthetic oligonucleotide
  Sense strand starting at position 2272 of SEQ ID NO: 1889028
cggguuccuuagguguaaa

SEQ ID NO: 2574347 - RNA, 19 nt, Artificial Sequence
  Description of Artificial Sequence: Synthetic oligonucleotide
  Antisense strand to SEQ ID NO: 2574346
uuuacaccuaaggaacccg

SEQ ID NO: 2574348 - RNA, 19 nt, Artificial Sequence
  Description of Artificial Sequence: Synthetic oligonucleotide
  Sense strand starting at position 2273 of SEQ ID NO: 1889028
ggguuccuuagguguaaac

SEQ ID NO: 2574349 - RNA, 19 nt, Artificial Sequence
  Description of Artificial Sequence: Synthetic oligonucleotide
  Antisense strand to SEQ ID NO: 2574348
guuuacaccuaaggaaccc

SEQ ID NO: 2574350 - RNA, 19 nt, Artificial Sequence
  Description of Artificial Sequence: Synthetic oligonucleotide
  Sense strand starting at position 2275 of SEQ ID NO: 1889028
guuccuuagguguaaacca

SEQ ID NO: 2574351 - RNA, 19 nt, Artificial Sequence
  Description of Artificial Sequence: Synthetic oligonucleotide
  Antisense strand to SEQ ID NO: 2574350
ugguuuacaccuaaggaac

SEQ ID NO: 2574352 - RNA, 19 nt, Artificial Sequence
  Description of Artificial Sequence: Synthetic oligonucleotide
  Sense strand starting at position 2298 of SEQ ID NO: 1889028
gaacucuugugucagucua

SEQ ID NO: 2574353 - RNA, 19 nt, Artificial Sequence
  Description of Artificial Sequence: Synthetic oligonucleotide
  Antisense strand to SEQ ID NO: 2574352
uagacugacacaagaguuc

SEQ ID NO: 2574354 - RNA, 19 nt, Artificial Sequence
  Description of Artificial Sequence: Synthetic oligonucleotide
  Sense strand starting at position 2300 of SEQ ID NO: 1889028
acucuugugucagucuaca

SEQ ID NO: 2574355 - RNA, 19 nt, Artificial Sequence
  Description of Artificial Sequence: Synthetic oligonucleotide
  Antisense strand to SEQ ID NO: 2574354
uguagacugacacaagagu

SEQ ID NO: 2574356 - RNA, 19 nt, Artificial Sequence
  Description of Artificial Sequence: Synthetic oligonucleotide
  Sense strand starting at position 2554 of SEQ ID NO: 1889028
guuagcucaggugauacuu

SEQ ID NO: 2574357 - RNA, 19 nt, Artificial Sequence
  Description of Artificial Sequence: Synthetic oligonucleotide
  Antisense strand to SEQ ID NO: 2574356
aaguaucaccugagcuaac

SEQ ID NO: 2574358 - RNA, 19 nt, Artificial Sequence
  Description of Artificial Sequence: Synthetic oligonucleotide
  Sense strand starting at position 2757 of SEQ ID NO: 1889028
gaggacuguuggucaggga

SEQ ID NO: 2574359 - RNA, 19 nt, Artificial Sequence
  Description of Artificial Sequence: Synthetic oligonucleotide
  Antisense strand to SEQ ID NO: 2574358
ucccugaccaacaguccuc

SEQ ID NO: 2574360 - RNA, 19 nt, Artificial Sequence
  Description of Artificial Sequence: Synthetic oligonucleotide
  Sense strand starting at position 2810 of SEQ ID NO: 1889028
cugacugucucucuuagau

SEQ ID NO: 2574361 - RNA, 19 nt, Artificial Sequence
  Description of Artificial Sequence: Synthetic oligonucleotide
  Antisense strand to SEQ ID NO: 2574360
aucuaagagagacagucag

SEQ ID NO: 2574362 - RNA, 19 nt, Artificial Sequence
  Description of Artificial Sequence: Synthetic oligonucleotide
  Sense strand starting at position 2812 of SEQ ID NO: 1889028
gacugucucucuuagaugu

SEQ ID NO: 2574363 - RNA, 19 nt, Artificial Sequence
  Description of Artificial Sequence: Synthetic oligonucleotide
  Antisense strand to SEQ ID NO: 2574362
acaucuaagagagacaguc

SEQ ID NO: 2574364 - RNA, 19 nt, Artificial Sequence
  Description of Artificial Sequence: Synthetic oligonucleotide
  Sense strand starting at position 2897 of SEQ ID NO: 1889028
ugagauccuuugcucucua

SEQ ID NO: 2574365 - RNA, 19 nt, Artificial Sequence
  Description of Artificial Sequence: Synthetic oligonucleotide
  Antisense strand to SEQ ID NO: 2574364
uagagagcaaaggaucuca

SEQ ID NO: 2574366 - RNA, 19 nt, Artificial Sequence
  Description of Artificial Sequence: Synthetic oligonucleotide
  Sense strand starting at position 2973 of SEQ ID NO: 1889028
gaccucuuuggccagagga

SEQ ID NO: 2574367 - RNA, 19 nt, Artificial Sequence
  Description of Artificial Sequence: Synthetic oligonucleotide
  Antisense strand to SEQ ID NO: 2574366
uccucuggccaaagagguc

SEQ ID NO: 2574368 - RNA, 19 nt, Artificial Sequence
  Description of Artificial Sequence: Synthetic oligonucleotide
  Sense strand starting at position 2975 of SEQ ID NO: 1889028
ccucuuuggccagaggaua

SEQ ID NO: 2574369 - RNA, 19 nt, Artificial Sequence
  Description of Artificial Sequence: Synthetic oligonucleotide
  Antisense strand to SEQ ID NO: 2574368
uauccucuggccaaagagg

SEQ ID NO: 2574370 - RNA, 19 nt, Artificial Sequence
  Description of Artificial Sequence: Synthetic oligonucleotide
  Sense strand starting at position 3221 of SEQ ID NO: 1889028
gggaguguccuugguucua

SEQ ID NO: 2574371 - RNA, 19 nt, Artificial Sequence
  Description of Artificial Sequence: Synthetic oligonucleotide
  Antisense strand to SEQ ID NO: 2574370
uagaaccaaggacacuccc

SEQ ID NO: 2574372 - RNA, 19 nt, Artificial Sequence
  Description of Artificial Sequence: Synthetic oligonucleotide
  Sense strand starting at position 3223 of SEQ ID NO: 1889028
gaguguccuugguucuaaa

SEQ ID NO: 2574373 - RNA, 19 nt, Artificial Sequence
  Description of Artificial Sequence: Synthetic oligonucleotide
  Antisense strand to SEQ ID NO: 2574372
uuuagaaccaaggacacuc

SEQ ID NO: 2574374 - RNA, 19 nt, Artificial Sequence
  Description of Artificial Sequence: Synthetic oligonucleotide
  Sense strand starting at position 3226 of SEQ ID NO: 1889028
uguccuugguucuaaaggu

SEQ ID NO: 2574375 - RNA, 19 nt, Artificial Sequence
  Description of Artificial Sequence: Synthetic oligonucleotide
  Antisense strand to SEQ ID NO: 2574374
accuuuagaaccaaggaca

SEQ ID NO: 2574376 - RNA, 19 nt, Artificial Sequence
  Description of Artificial Sequence: Synthetic oligonucleotide
  Sense strand starting at position 3232 of SEQ ID NO: 1889028
ugguucuaaagguguggaa

SEQ ID NO: 2574377 - RNA, 19 nt, Artificial Sequence
  Description of Artificial Sequence: Synthetic oligonucleotide
  Antisense strand to SEQ ID NO: 2574376
uuccacaccuuuagaacca

SEQ ID NO: 2574378 - RNA, 19 nt, Artificial Sequence
  Description of Artificial Sequence: Synthetic oligonucleotide
  Sense strand starting at position 3234 of SEQ ID NO: 1889028
guucuaaagguguggaaag

SEQ ID NO: 2574379 - RNA, 19 nt, Artificial Sequence
  Description of Artificial Sequence: Synthetic oligonucleotide
  Antisense strand to SEQ ID NO: 2574378
cuuuccacaccuuuagaac

SEQ ID NO: 2574380 - RNA, 19 nt, Artificial Sequence
  Description of Artificial Sequence: Synthetic oligonucleotide
  Sense strand starting at position 3235 of SEQ ID NO: 1889028
uucuaaagguguggaaaga

SEQ ID NO: 2574381 - RNA, 19 nt, Artificial Sequence
  Description of Artificial Sequence: Synthetic oligonucleotide
  Antisense strand to SEQ ID NO: 2574380
ucuuuccacaccuuuagaa

SEQ ID NO: 2574382 - RNA, 19 nt, Artificial Sequence
  Description of Artificial Sequence: Synthetic oligonucleotide
  Sense strand starting at position 3252 of SEQ ID NO: 1889028
gagaaauccuguuuagcag

SEQ ID NO: 2574383 - RNA, 19 nt, Artificial Sequence
  Description of Artificial Sequence: Synthetic oligonucleotide
  Antisense strand to SEQ ID NO: 2574382
cugcuaaacaggauuucuc

SEQ ID NO: 2574384 - RNA, 19 nt, Artificial Sequence
  Description of Artificial Sequence: Synthetic oligonucleotide
  Sense strand starting at position 3266 of SEQ ID NO: 1889028
agcagcuauuugccugaga

SEQ ID NO: 2574385 - RNA, 19 nt, Artificial Sequence
  Description of Artificial Sequence: Synthetic oligonucleotide
  Antisense strand to SEQ ID NO: 2574384
ucucaggcaaauagcugcu

SEQ ID NO: 2574386 - RNA, 19 nt, Artificial Sequence
  Description of Artificial Sequence: Synthetic oligonucleotide
  Sense strand starting at position 3267 of SEQ ID NO: 1889028
gcagcuauuugccugagag

SEQ ID NO: 2574387 - RNA, 19 nt, Artificial Sequence
  Description of Artificial Sequence: Synthetic oligonucleotide
  Antisense strand to SEQ ID NO: 2574386
cucucaggcaaauagcugc

SEQ ID NO: 2574388 - RNA, 19 nt, Artificial Sequence
  Description of Artificial Sequence: Synthetic oligonucleotide
  Sense strand starting at position 3335 of SEQ ID NO: 1889028
gggaacucuucccaggaca

SEQ ID NO: 2574389 - RNA, 19 nt, Artificial Sequence
  Description of Artificial Sequence: Synthetic oligonucleotide
  Antisense strand to SEQ ID NO: 2574388
uguccugggaagaguuccc

SEQ ID NO: 2574390 - RNA, 19 nt, Artificial Sequence
  Description of Artificial Sequence: Synthetic oligonucleotide
  Sense strand starting at position 3447 of SEQ ID NO: 1889028
caggguucugcagaggaca

SEQ ID NO: 2574391 - RNA, 19 nt, Artificial Sequence
  Description of Artificial Sequence: Synthetic oligonucleotide
  Antisense strand to SEQ ID NO: 2574390
uguccucugcagaacccug

SEQ ID NO: 2574392 - RNA, 19 nt, Artificial Sequence
  Description of Artificial Sequence: Synthetic oligonucleotide
  Sense strand starting at position 3624 of SEQ ID NO: 1889028
gcacuuuccuccgaagcuu

SEQ ID NO: 2574393 - RNA, 19 nt, Artificial Sequence
  Description of Artificial Sequence: Synthetic oligonucleotide
  Antisense strand to SEQ ID NO: 2574392
aagcuucggaggaaagugc

SEQ ID NO: 2574394 - RNA, 19 nt, Artificial Sequence
  Description of Artificial Sequence: Synthetic oligonucleotide
  Sense strand starting at position 3965 of SEQ ID NO: 1889028
aacagagugugagauccaa

SEQ ID NO: 2574395 - RNA, 19 nt, Artificial Sequence
  Description of Artificial Sequence: Synthetic oligonucleotide
  Antisense strand to SEQ ID NO: 2574394
uuggaucucacacucuguu

SEQ ID NO: 2574396 - RNA, 19 nt, Artificial Sequence
  Description of Artificial Sequence: Synthetic oligonucleotide
  Sense strand starting at position 116 of SEQ ID NO: 1889029
ugagcaagguuuguagaaa

SEQ ID NO: 2574397 - RNA, 19 nt, Artificial Sequence
  Description of Artificial Sequence: Synthetic oligonucleotide
  Antisense strand to SEQ ID NO: 2574396
uuucuacaaaccuugcuca

SEQ ID NO: 2574398 - RNA, 19 nt, Artificial Sequence
  Description of Artificial Sequence: Synthetic oligonucleotide
  Sense strand starting at position 275 of SEQ ID NO: 1889029
ugaagaaguuuccuugcua

SEQ ID NO: 2574399 - RNA, 19 nt, Artificial Sequence
  Description of Artificial Sequence: Synthetic oligonucleotide
  Antisense strand to SEQ ID NO: 2574398
uagcaaggaaacuucuuca

SEQ ID NO: 2574400 - RNA, 19 nt, Artificial Sequence
  Description of Artificial Sequence: Synthetic oligonucleotide
  Sense strand starting at position 276 of SEQ ID NO: 1889029
gaagaaguuuccuugcuac

SEQ ID NO: 2574401 - RNA, 19 nt, Artificial Sequence
  Description of Artificial Sequence: Synthetic oligonucleotide
  Antisense strand to SEQ ID NO: 2574400
guagcaaggaaacuucuuc

SEQ ID NO: 2574402 - RNA, 19 nt, Artificial Sequence
  Description of Artificial Sequence: Synthetic oligonucleotide
  Sense strand starting at position 279 of SEQ ID NO: 1889029
gaaguuuccuugcuacaag

SEQ ID NO: 2574403 - RNA, 19 nt, Artificial Sequence
  Description of Artificial Sequence: Synthetic oligonucleotide
  Antisense strand to SEQ ID NO: 2574402
cuuguagcaaggaaacuuc

SEQ ID NO: 2574404 - RNA, 19 nt, Artificial Sequence
  Description of Artificial Sequence: Synthetic oligonucleotide
  Sense strand starting at position 490 of SEQ ID NO: 1889029
gugcugugucgagaaggaa

SEQ ID NO: 2574405 - RNA, 19 nt, Artificial Sequence
  Description of Artificial Sequence: Synthetic oligonucleotide
  Antisense strand to SEQ ID NO: 2574404
uuccuucucgacacagcac

SEQ ID NO: 2574406 - RNA, 19 nt, Artificial Sequence
  Description of Artificial Sequence: Synthetic oligonucleotide
  Sense strand starting at position 526 of SEQ ID NO: 1889029
uggcuuggccaguaagauc

SEQ ID NO: 2574407 - RNA, 19 nt, Artificial Sequence
  Description of Artificial Sequence: Synthetic oligonucleotide
  Antisense strand to SEQ ID NO: 2574406
gaucuuacuggccaagcca

SEQ ID NO: 2574408 - RNA, 19 nt, Artificial Sequence
  Description of Artificial Sequence: Synthetic oligonucleotide
  Sense strand starting at position 638 of SEQ ID NO: 1889029
aaauaaguguccguccaug

SEQ ID NO: 2574409 - RNA, 19 nt, Artificial Sequence
  Description of Artificial Sequence: Synthetic oligonucleotide
  Antisense strand to SEQ ID NO: 2574408
cauggacggacacuuauuu

SEQ ID NO: 2574410 - RNA, 19 nt, Artificial Sequence
  Description of Artificial Sequence: Synthetic oligonucleotide
  Sense strand starting at position 728 of SEQ ID NO: 1889029
ugcagagucucauuucucu

SEQ ID NO: 2574411 - RNA, 19 nt, Artificial Sequence
  Description of Artificial Sequence: Synthetic oligonucleotide
  Antisense strand to SEQ ID NO: 2574410
agagaaaugagacucugca

SEQ ID NO: 2574412 - RNA, 19 nt, Artificial Sequence
  Description of Artificial Sequence: Synthetic oligonucleotide
  Sense strand starting at position 748 of SEQ ID NO: 1889029
ccgaaacucuuacuggauc

SEQ ID NO: 2574413 - RNA, 19 nt, Artificial Sequence
  Description of Artificial Sequence: Synthetic oligonucleotide
  Antisense strand to SEQ ID NO: 2574412
gauccaguaagaguuucgg

SEQ ID NO: 2574414 - RNA, 19 nt, Artificial Sequence
  Description of Artificial Sequence: Synthetic oligonucleotide
  Sense strand starting at position 795 of SEQ ID NO: 1889029
cagcauuucugguccggau

SEQ ID NO: 2574415 - RNA, 19 nt, Artificial Sequence
  Description of Artificial Sequence: Synthetic oligonucleotide
  Antisense strand to SEQ ID NO: 2574414
auccggaccagaaaugcug

SEQ ID NO: 2574416 - RNA, 19 nt, Artificial Sequence
  Description of Artificial Sequence: Synthetic oligonucleotide
  Sense strand starting at position 924 of SEQ ID NO: 1889029
gaauguacugaugguaucu

SEQ ID NO: 2574417 - RNA, 19 nt, Artificial Sequence
  Description of Artificial Sequence: Synthetic oligonucleotide
  Antisense strand to SEQ ID NO: 2574416
agauaccaucaguacauuc

SEQ ID NO: 2574418 - RNA, 19 nt, Artificial Sequence
  Description of Artificial Sequence: Synthetic oligonucleotide
  Sense strand starting at position 933 of SEQ ID NO: 1889029
gaugguaucuggcccagaa

SEQ ID NO: 2574419 - RNA, 19 nt, Artificial Sequence
  Description of Artificial Sequence: Synthetic oligonucleotide
  Antisense strand to SEQ ID NO: 2574418
uucugggccagauaccauc

SEQ ID NO: 2574420 - RNA, 19 nt, Artificial Sequence
  Description of Artificial Sequence: Synthetic oligonucleotide
  Sense strand starting at position 1104 of SEQ ID NO: 1889029
cggccauauccacauccau

SEQ ID NO: 2574421 - RNA, 19 nt, Artificial Sequence
  Description of Artificial Sequence: Synthetic oligonucleotide
  Antisense strand to SEQ ID NO: 2574420
auggauguggauauggccg

SEQ ID NO: 2574422 - RNA, 19 nt, Artificial Sequence
  Description of Artificial Sequence: Synthetic oligonucleotide
  Sense strand starting at position 1383 of SEQ ID NO: 1889029
ggugccucugugaguguuu

SEQ ID NO: 2574423 - RNA, 19 nt, Artificial Sequence
  Description of Artificial Sequence: Synthetic oligonucleotide
  Antisense strand to SEQ ID NO: 2574422
aaacacucacagaggcacc

SEQ ID NO: 2574424 - RNA, 19 nt, Artificial Sequence
  Description of Artificial Sequence: Synthetic oligonucleotide
  Sense strand starting at position 1400 of SEQ ID NO: 1889029
uugguacccucacuggaau

SEQ ID NO: 2574425 - RNA, 19 nt, Artificial Sequence
  Description of Artificial Sequence: Synthetic oligonucleotide
  Antisense strand to SEQ ID NO: 2574424
auuccagugaggguaccaa

SEQ ID NO: 2574426 - RNA, 19 nt, Artificial Sequence
  Description of Artificial Sequence: Synthetic oligonucleotide
  Sense strand starting at position 1401 of SEQ ID NO: 1889029
ugguacccucacuggaaua

SEQ ID NO: 2574427 - RNA, 19 nt, Artificial Sequence
  Description of Artificial Sequence: Synthetic oligonucleotide
  Antisense strand to SEQ ID NO: 2574426
uauuccagugaggguacca

SEQ ID NO: 2574428 - RNA, 19 nt, Artificial Sequence
  Description of Artificial Sequence: Synthetic oligonucleotide
  Sense strand starting at position 1508 of SEQ ID NO: 1889029
ccuuaccugggcgaugaau

SEQ ID NO: 2574429 - RNA, 19 nt, Artificial Sequence
  Description of Artificial Sequence: Synthetic oligonucleotide
  Antisense strand to SEQ ID NO: 2574428
auucaucgcccagguaagg

SEQ ID NO: 2574430 - RNA, 19 nt, Artificial Sequence
  Description of Artificial Sequence: Synthetic oligonucleotide
  Sense strand starting at position 1612 of SEQ ID NO: 1889029
ucuuguauuccagguaccu

SEQ ID NO: 2574431 - RNA, 19 nt, Artificial Sequence
  Description of Artificial Sequence: Synthetic oligonucleotide
  Antisense strand to SEQ ID NO: 2574430
agguaccuggaauacaaga

SEQ ID NO: 2574432 - RNA, 19 nt, Artificial Sequence
  Description of Artificial Sequence: Synthetic oligonucleotide
  Sense strand starting at position 1883 of SEQ ID NO: 1889029
gcauuugucuguagggagg

SEQ ID NO: 2574433 - RNA, 19 nt, Artificial Sequence
  Description of Artificial Sequence: Synthetic oligonucleotide
  Antisense strand to SEQ ID NO: 2574432
ccucccuacagacaaaugc

SEQ ID NO: 2574434 - RNA, 19 nt, Artificial Sequence
  Description of Artificial Sequence: Synthetic oligonucleotide
  Sense strand starting at position 2271 of SEQ ID NO: 1889029
cggguuccuuagguguaaa

SEQ ID NO: 2574435 - RNA, 19 nt, Artificial Sequence
  Description of Artificial Sequence: Synthetic oligonucleotide
  Antisense strand to SEQ ID NO: 2574434
uuuacaccuaaggaacccg

SEQ ID NO: 2574436 - RNA, 19 nt, Artificial Sequence
  Description of Artificial Sequence: Synthetic oligonucleotide
  Sense strand starting at position 2272 of SEQ ID NO: 1889029
ggguuccuuagguguaaac

SEQ ID NO: 2574437 - RNA, 19 nt, Artificial Sequence
  Description of Artificial Sequence: Synthetic oligonucleotide
  Antisense strand to SEQ ID NO: 2574436
guuuacaccuaaggaaccc

SEQ ID NO: 2574438 - RNA, 19 nt, Artificial Sequence
  Description of Artificial Sequence: Synthetic oligonucleotide
  Sense strand starting at position 2274 of SEQ ID NO: 1889029
guuccuuagguguaaacca

SEQ ID NO: 2574439 - RNA, 19 nt, Artificial Sequence
  Description of Artificial Sequence: Synthetic oligonucleotide
  Antisense strand to SEQ ID NO: 2574438
ugguuuacaccuaaggaac

SEQ ID NO: 2574440 - RNA, 19 nt, Artificial Sequence
  Description of Artificial Sequence: Synthetic oligonucleotide
  Sense strand starting at position 2299 of SEQ ID NO: 1889029
acucuugugucagucuaca

SEQ ID NO: 2574441 - RNA, 19 nt, Artificial Sequence
  Description of Artificial Sequence: Synthetic oligonucleotide
  Antisense strand to SEQ ID NO: 2574440
uguagacugacacaagagu

SEQ ID NO: 2574442 - RNA, 19 nt, Artificial Sequence
  Description of Artificial Sequence: Synthetic oligonucleotide
  Sense strand starting at position 2553 of SEQ ID NO: 1889029
guuagcucaggugauacuu

SEQ ID NO: 2574443 - RNA, 19 nt, Artificial Sequence
  Description of Artificial Sequence: Synthetic oligonucleotide
  Antisense strand to SEQ ID NO: 2574442
aaguaucaccugagcuaac

SEQ ID NO: 2574444 - RNA, 19 nt, Artificial Sequence
  Description of Artificial Sequence: Synthetic oligonucleotide
  Sense strand starting at position 2584 of SEQ ID NO: 1889029
caaagucaucugugaugag

SEQ ID NO: 2574445 - RNA, 19 nt, Artificial Sequence
  Description of Artificial Sequence: Synthetic oligonucleotide
  Antisense strand to SEQ ID NO: 2574444
cucaucacagaugacuuug

SEQ ID NO: 2574446 - RNA, 19 nt, Artificial Sequence
  Description of Artificial Sequence: Synthetic oligonucleotide
  Sense strand starting at position 2596 of SEQ ID NO: 1889029
ugaugagcuuccucagauc

SEQ ID NO: 2574447 - RNA, 19 nt, Artificial Sequence
  Description of Artificial Sequence: Synthetic oligonucleotide
  Antisense strand to SEQ ID NO: 2574446
gaucugaggaagcucauca

SEQ ID NO: 2574448 - RNA, 19 nt, Artificial Sequence
  Description of Artificial Sequence: Synthetic oligonucleotide
  Sense strand starting at position 2756 of SEQ ID NO: 1889029
gaggacuguuggucaggga

SEQ ID NO: 2574449 - RNA, 19 nt, Artificial Sequence
  Description of Artificial Sequence: Synthetic oligonucleotide
  Antisense strand to SEQ ID NO: 2574448
ucccugaccaacaguccuc

SEQ ID NO: 2574450 - RNA, 19 nt, Artificial Sequence
  Description of Artificial Sequence: Synthetic oligonucleotide
  Sense strand starting at position 2809 of SEQ ID NO: 1889029
cugacugucucucuuagau

SEQ ID NO: 2574451 - RNA, 19 nt, Artificial Sequence
  Description of Artificial Sequence: Synthetic oligonucleotide
  Antisense strand to SEQ ID NO: 2574450
aucuaagagagacagucag

SEQ ID NO: 2574452 - RNA, 19 nt, Artificial Sequence
  Description of Artificial Sequence: Synthetic oligonucleotide
  Sense strand starting at position 2896 of SEQ ID NO: 1889029
ugagauccuuugcucucua

SEQ ID NO: 2574453 - RNA, 19 nt, Artificial Sequence
  Description of Artificial Sequence: Synthetic oligonucleotide
  Antisense strand to SEQ ID NO: 2574452
uagagagcaaaggaucuca

SEQ ID NO: 2574454 - RNA, 19 nt, Artificial Sequence
  Description of Artificial Sequence: Synthetic oligonucleotide
  Sense strand starting at position 2972 of SEQ ID NO: 1889029
gaccucuuuggccagagga

SEQ ID NO: 2574455 - RNA, 19 nt, Artificial Sequence
  Description of Artificial Sequence: Synthetic oligonucleotide
  Antisense strand to SEQ ID NO: 2574454
uccucuggccaaagagguc

SEQ ID NO: 2574456 - RNA, 19 nt, Artificial Sequence
  Description of Artificial Sequence: Synthetic oligonucleotide
  Sense strand starting at position 2974 of SEQ ID NO: 1889029
ccucuuuggccagaggaua

SEQ ID NO: 2574457 - RNA, 19 nt, Artificial Sequence
  Description of Artificial Sequence: Synthetic oligonucleotide
  Antisense strand to SEQ ID NO: 2574456
uauccucuggccaaagagg

SEQ ID NO: 2574458 - RNA, 19 nt, Artificial Sequence
  Description of Artificial Sequence: Synthetic oligonucleotide
  Sense strand starting at position 3220 of SEQ ID NO: 1889029
gggaguguccuugguucua

SEQ ID NO: 2574459 - RNA, 19 nt, Artificial Sequence
  Description of Artificial Sequence: Synthetic oligonucleotide
  Antisense strand to SEQ ID NO: 2574458
uagaaccaaggacacuccc

SEQ ID NO: 2574460 - RNA, 19 nt, Artificial Sequence
  Description of Artificial Sequence: Synthetic oligonucleotide
  Sense strand starting at position 3222 of SEQ ID NO: 1889029
gaguguccuugguucuaaa

SEQ ID NO: 2574461 - RNA, 19 nt, Artificial Sequence
  Description of Artificial Sequence: Synthetic oligonucleotide
  Antisense strand to SEQ ID NO: 2574460
uuuagaaccaaggacacuc

SEQ ID NO: 2574462 - RNA, 19 nt, Artificial Sequence
  Description of Artificial Sequence: Synthetic oligonucleotide
  Sense strand starting at position 3231 of SEQ ID NO: 1889029
ugguucuaaagguguggaa

SEQ ID NO: 2574463 - RNA, 19 nt, Artificial Sequence
  Description of Artificial Sequence: Synthetic oligonucleotide
  Antisense strand to SEQ ID NO: 2574462
uuccacaccuuuagaacca

SEQ ID NO: 2574464 - RNA, 19 nt, Artificial Sequence
  Description of Artificial Sequence: Synthetic oligonucleotide
  Sense strand starting at position 3233 of SEQ ID NO: 1889029
guucuaaagguguggaaag

SEQ ID NO: 2574465 - RNA, 19 nt, Artificial Sequence
  Description of Artificial Sequence: Synthetic oligonucleotide
  Antisense strand to SEQ ID NO: 2574464
cuuuccacaccuuuagaac

SEQ ID NO: 2574466 - RNA, 19 nt, Artificial Sequence
  Description of Artificial Sequence: Synthetic oligonucleotide
  Sense strand starting at position 3265 of SEQ ID NO: 1889029
agcagcuauuugccugaga

SEQ ID NO: 2574467 - RNA, 19 nt, Artificial Sequence
  Description of Artificial Sequence: Synthetic oligonucleotide
  Antisense strand to SEQ ID NO: 2574466
ucucaggcaaauagcugcu

SEQ ID NO: 2574468 - RNA, 19 nt, Artificial Sequence
  Description of Artificial Sequence: Synthetic oligonucleotide
  Sense strand starting at position 3266 of SEQ ID NO: 1889029
gcagcuauuugccugagag

SEQ ID NO: 2574469 - RNA, 19 nt, Artificial Sequence
  Description of Artificial Sequence: Synthetic oligonucleotide
  Antisense strand to SEQ ID NO: 2574468
cucucaggcaaauagcugc

SEQ ID NO: 2574470 - RNA, 19 nt, Artificial Sequence
  Description of Artificial Sequence: Synthetic oligonucleotide
  Sense strand starting at position 3334 of SEQ ID NO: 1889029
gggaacucuucccaggaca

SEQ ID NO: 2574471 - RNA, 19 nt, Artificial Sequence
  Description of Artificial Sequence: Synthetic oligonucleotide
  Antisense strand to SEQ ID NO: 2574470
uguccugggaagaguuccc

SEQ ID NO: 2574472 - RNA, 19 nt, Artificial Sequence
  Description of Artificial Sequence: Synthetic oligonucleotide
  Sense strand starting at position 3446 of SEQ ID NO: 1889029
caggguucugcagaggaca

SEQ ID NO: 2574473 - RNA, 19 nt, Artificial Sequence
  Description of Artificial Sequence: Synthetic oligonucleotide
  Antisense strand to SEQ ID NO: 2574472
uguccucugcagaacccug

SEQ ID NO: 2574474 - RNA, 19 nt, Artificial Sequence
  Description of Artificial Sequence: Synthetic oligonucleotide
  Sense strand starting at position 3885 of SEQ ID NO: 1889029
gugugcagacaagaauaua

SEQ ID NO: 2574475 - RNA, 19 nt, Artificial Sequence
  Description of Artificial Sequence: Synthetic oligonucleotide
  Antisense strand to SEQ ID NO: 2574474
uauauucuugucugcacac

SEQ ID NO: 2574476 - RNA, 19 nt, Artificial Sequence
  Description of Artificial Sequence: Synthetic oligonucleotide
  Sense strand starting at position 116 of SEQ ID NO: 1889030
cugagcaagguuuguagaa

SEQ ID NO: 2574477 - RNA, 19 nt, Artificial Sequence
  Description of Artificial Sequence: Synthetic oligonucleotide
  Antisense strand to SEQ ID NO: 2574476
uucuacaaaccuugcucag

SEQ ID NO: 2574478 - RNA, 19 nt, Artificial Sequence
  Description of Artificial Sequence: Synthetic oligonucleotide
  Sense strand starting at position 117 of SEQ ID NO: 1889030
ugagcaagguuuguagaaa

SEQ ID NO: 2574479 - RNA, 19 nt, Artificial Sequence
  Description of Artificial Sequence: Synthetic oligonucleotide
  Antisense strand to SEQ ID NO: 2574478
uuucuacaaaccuugcuca

SEQ ID NO: 2574480 - RNA, 19 nt, Artificial Sequence
  Description of Artificial Sequence: Synthetic oligonucleotide
  Sense strand starting at position 276 of SEQ ID NO: 1889030
ugaagaaguuuccuugcua

SEQ ID NO: 2574481 - RNA, 19 nt, Artificial Sequence
  Description of Artificial Sequence: Synthetic oligonucleotide
  Antisense strand to SEQ ID NO: 2574480
uagcaaggaaacuucuuca

SEQ ID NO: 2574482 - RNA, 19 nt, Artificial Sequence
  Description of Artificial Sequence: Synthetic oligonucleotide
  Sense strand starting at position 277 of SEQ ID NO: 1889030
gaagaaguuuccuugcuac

SEQ ID NO: 2574483 - RNA, 19 nt, Artificial Sequence
  Description of Artificial Sequence: Synthetic oligonucleotide
  Antisense strand to SEQ ID NO: 2574482
guagcaaggaaacuucuuc

SEQ ID NO: 2574484 - RNA, 19 nt, Artificial Sequence
  Description of Artificial Sequence: Synthetic oligonucleotide
  Sense strand starting at position 280 of SEQ ID NO: 1889030
gaaguuuccuugcuacaag

SEQ ID NO: 2574485 - RNA, 19 nt, Artificial Sequence
  Description of Artificial Sequence: Synthetic oligonucleotide
  Antisense strand to SEQ ID NO: 2574484
cuuguagcaaggaaacuuc

SEQ ID NO: 2574486 - RNA, 19 nt, Artificial Sequence
  Description of Artificial Sequence: Synthetic oligonucleotide
  Sense strand starting at position 555 of SEQ ID NO: 1889030
cgucaacggugccuauaaa

SEQ ID NO: 2574487 - RNA, 19 nt, Artificial Sequence
  Description of Artificial Sequence: Synthetic oligonucleotide
  Antisense strand to SEQ ID NO: 2574486
uuuauaggcaccguugacg

SEQ ID NO: 2574488 - RNA, 19 nt, Artificial Sequence
  Description of Artificial Sequence: Synthetic oligonucleotide
  Sense strand starting at position 639 of SEQ ID NO: 1889030
aaauaaguguccguccaug

SEQ ID NO: 2574489 - RNA, 19 nt, Artificial Sequence
  Description of Artificial Sequence: Synthetic oligonucleotide
  Antisense strand to SEQ ID NO: 2574488
cauggacggacacuuauuu

SEQ ID NO: 2574490 - RNA, 19 nt, Artificial Sequence
  Description of Artificial Sequence: Synthetic oligonucleotide
  Sense strand starting at position 729 of SEQ ID NO: 1889030
ugcagagucucauuucucu

SEQ ID NO: 2574491 - RNA, 19 nt, Artificial Sequence
  Description of Artificial Sequence: Synthetic oligonucleotide
  Antisense strand to SEQ ID NO: 2574490
agagaaaugagacucugca

SEQ ID NO: 2574492 - RNA, 19 nt, Artificial Sequence
  Description of Artificial Sequence: Synthetic oligonucleotide
  Sense strand starting at position 1185 of SEQ ID NO: 1889030
uucugauucugaggaggaa

SEQ ID NO: 2574493 - RNA, 19 nt, Artificial Sequence
  Description of Artificial Sequence: Synthetic oligonucleotide
  Antisense strand to SEQ ID NO: 2574492
uuccuccucagaaucagaa

SEQ ID NO: 2574494 - RNA, 19 nt, Artificial Sequence
  Description of Artificial Sequence: Synthetic oligonucleotide
  Sense strand starting at position 1268 of SEQ ID NO: 1889030
ucccgugugcuuugugcaa

SEQ ID NO: 2574495 - RNA, 19 nt, Artificial Sequence
  Description of Artificial Sequence: Synthetic oligonucleotide
  Antisense strand to SEQ ID NO: 2574494
uugcacaaagcacacggga

SEQ ID NO: 2574496 - RNA, 19 nt, Artificial Sequence
  Description of Artificial Sequence: Synthetic oligonucleotide
  Sense strand starting at position 1272 of SEQ ID NO: 1889030
gugugcuuugugcaaugau

SEQ ID NO: 2574497 - RNA, 19 nt, Artificial Sequence
  Description of Artificial Sequence: Synthetic oligonucleotide
  Antisense strand to SEQ ID NO: 2574496
aucauugcacaaagcacac

SEQ ID NO: 2574498 - RNA, 19 nt, Artificial Sequence
  Description of Artificial Sequence: Synthetic oligonucleotide
  Sense strand starting at position 1384 of SEQ ID NO: 1889030
ggugccucugugaguguuu

SEQ ID NO: 2574499 - RNA, 19 nt, Artificial Sequence
  Description of Artificial Sequence: Synthetic oligonucleotide
  Antisense strand to SEQ ID NO: 2574498
aaacacucacagaggcacc

SEQ ID NO: 2574500 - RNA, 19 nt, Artificial Sequence
  Description of Artificial Sequence: Synthetic oligonucleotide
  Sense strand starting at position 1401 of SEQ ID NO: 1889030
uugguacccucacuggaau

SEQ ID NO: 2574501 - RNA, 19 nt, Artificial Sequence
  Description of Artificial Sequence: Synthetic oligonucleotide
  Antisense strand to SEQ ID NO: 2574500
auuccagugaggguaccaa

SEQ ID NO: 2574502 - RNA, 19 nt, Artificial Sequence
  Description of Artificial Sequence: Synthetic oligonucleotide
  Sense strand starting at position 1402 of SEQ ID NO: 1889030
ugguacccucacuggaaua

SEQ ID NO: 2574503 - RNA, 19 nt, Artificial Sequence
  Description of Artificial Sequence: Synthetic oligonucleotide
  Antisense strand to SEQ ID NO: 2574502
uauuccagugaggguacca

SEQ ID NO: 2574504 - RNA, 19 nt, Artificial Sequence
  Description of Artificial Sequence: Synthetic oligonucleotide
  Sense strand starting at position 1509 of SEQ ID NO: 1889030
ccuuaccugggcgaugaau

SEQ ID NO: 2574505 - RNA, 19 nt, Artificial Sequence
  Description of Artificial Sequence: Synthetic oligonucleotide
  Antisense strand to SEQ ID NO: 2574504
auucaucgcccagguaagg

SEQ ID NO: 2574506 - RNA, 19 nt, Artificial Sequence
  Description of Artificial Sequence: Synthetic oligonucleotide
  Sense strand starting at position 2272 of SEQ ID NO: 1889030
cggguuccuuagguguaaa

SEQ ID NO: 2574507 - RNA, 19 nt, Artificial Sequence
  Description of Artificial Sequence: Synthetic oligonucleotide
  Antisense strand to SEQ ID NO: 2574506
uuuacaccuaaggaacccg

SEQ ID NO: 2574508 - RNA, 19 nt, Artificial Sequence
  Description of Artificial Sequence: Synthetic oligonucleotide
  Sense strand starting at position 2273 of SEQ ID NO: 1889030
ggguuccuuagguguaaac

SEQ ID NO: 2574509 - RNA, 19 nt, Artificial Sequence
  Description of Artificial Sequence: Synthetic oligonucleotide
  Antisense strand to SEQ ID NO: 2574508
guuuacaccuaaggaaccc

SEQ ID NO: 2574510 - RNA, 19 nt, Artificial Sequence
  Description of Artificial Sequence: Synthetic oligonucleotide
  Sense strand starting at position 2275 of SEQ ID NO: 1889030
guuccuuagguguaaacca

SEQ ID NO: 2574511 - RNA, 19 nt, Artificial Sequence
  Description of Artificial Sequence: Synthetic oligonucleotide
  Antisense strand to SEQ ID NO: 2574510
ugguuuacaccuaaggaac

SEQ ID NO: 2574512 - RNA, 19 nt, Artificial Sequence
  Description of Artificial Sequence: Synthetic oligonucleotide
  Sense strand starting at position 2298 of SEQ ID NO: 1889030
gaacucuugugucagucua

SEQ ID NO: 2574513 - RNA, 19 nt, Artificial Sequence
  Description of Artificial Sequence: Synthetic oligonucleotide
  Antisense strand to SEQ ID NO: 2574512
uagacugacacaagaguuc

SEQ ID NO: 2574514 - RNA, 19 nt, Artificial Sequence
  Description of Artificial Sequence: Synthetic oligonucleotide
  Sense strand starting at position 2300 of SEQ ID NO: 1889030
acucuugugucagucuaca

SEQ ID NO: 2574515 - RNA, 19 nt, Artificial Sequence
  Description of Artificial Sequence: Synthetic oligonucleotide
  Antisense strand to SEQ ID NO: 2574514
uguagacugacacaagagu

SEQ ID NO: 2574516 - RNA, 19 nt, Artificial Sequence
  Description of Artificial Sequence: Synthetic oligonucleotide
  Sense strand starting at position 2554 of SEQ ID NO: 1889030
guuagcucaggugauacuu

SEQ ID NO: 2574517 - RNA, 19 nt, Artificial Sequence
  Description of Artificial Sequence: Synthetic oligonucleotide
  Antisense strand to SEQ ID NO: 2574516
aaguaucaccugagcuaac

SEQ ID NO: 2574518 - RNA, 19 nt, Artificial Sequence
  Description of Artificial Sequence: Synthetic oligonucleotide
  Sense strand starting at position 2757 of SEQ ID NO: 1889030
gaggacuguuggucaggga

SEQ ID NO: 2574519 - RNA, 19 nt, Artificial Sequence
  Description of Artificial Sequence: Synthetic oligonucleotide
  Antisense strand to SEQ ID NO: 2574518
ucccugaccaacaguccuc

SEQ ID NO: 2574520 - RNA, 19 nt, Artificial Sequence
  Description of Artificial Sequence: Synthetic oligonucleotide
  Sense strand starting at position 2810 of SEQ ID NO: 1889030
cugacugucucucuuagau

SEQ ID NO: 2574521 - RNA, 19 nt, Artificial Sequence
  Description of Artificial Sequence: Synthetic oligonucleotide
  Antisense strand to SEQ ID NO: 2574520
aucuaagagagacagucag

SEQ ID NO: 2574522 - RNA, 19 nt, Artificial Sequence
  Description of Artificial Sequence: Synthetic oligonucleotide
  Sense strand starting at position 2812 of SEQ ID NO: 1889030
gacugucucucuuagaugu

SEQ ID NO: 2574523 - RNA, 19 nt, Artificial Sequence
  Description of Artificial Sequence: Synthetic oligonucleotide
  Antisense strand to SEQ ID NO: 2574522
acaucuaagagagacaguc

SEQ ID NO: 2574524 - RNA, 19 nt, Artificial Sequence
  Description of Artificial Sequence: Synthetic oligonucleotide
  Sense strand starting at position 2897 of SEQ ID NO: 1889030
ugagauccuuugcucucua

SEQ ID NO: 2574525 - RNA, 19 nt, Artificial Sequence
  Description of Artificial Sequence: Synthetic oligonucleotide
  Antisense strand to SEQ ID NO: 2574524
uagagagcaaaggaucuca

SEQ ID NO: 2574526 - RNA, 19 nt, Artificial Sequence
  Description of Artificial Sequence: Synthetic oligonucleotide
  Sense strand starting at position 2973 of SEQ ID NO: 1889030
gaccucuuuggccagagga

SEQ ID NO: 2574527 - RNA, 19 nt, Artificial Sequence
  Description of Artificial Sequence: Synthetic oligonucleotide
  Antisense strand to SEQ ID NO: 2574526
uccucuggccaaagagguc

SEQ ID NO: 2574528 - RNA, 19 nt, Artificial Sequence
  Description of Artificial Sequence: Synthetic oligonucleotide
  Sense strand starting at position 2975 of SEQ ID NO: 1889030
ccucuuuggccagaggaua

SEQ ID NO: 2574529 - RNA, 19 nt, Artificial Sequence
  Description of Artificial Sequence: Synthetic oligonucleotide
  Antisense strand to SEQ ID NO: 2574528
uauccucuggccaaagagg

SEQ ID NO: 2574530 - RNA, 19 nt, Artificial Sequence
  Description of Artificial Sequence: Synthetic oligonucleotide
  Sense strand starting at position 3221 of SEQ ID NO: 1889030
gggaguguccuugguucua

SEQ ID NO: 2574531 - RNA, 19 nt, Artificial Sequence
  Description of Artificial Sequence: Synthetic oligonucleotide
  Antisense strand to SEQ ID NO: 2574530
uagaaccaaggacacuccc

SEQ ID NO: 2574532 - RNA, 19 nt, Artificial Sequence
  Description of Artificial Sequence: Synthetic oligonucleotide
  Sense strand starting at position 3223 of SEQ ID NO: 1889030
gaguguccuugguucuaaa

SEQ ID NO: 2574533 - RNA, 19 nt, Artificial Sequence
  Description of Artificial Sequence: Synthetic oligonucleotide
  Antisense strand to SEQ ID NO: 2574532
uuuagaaccaaggacacuc

SEQ ID NO: 2574534 - RNA, 19 nt, Artificial Sequence
  Description of Artificial Sequence: Synthetic oligonucleotide
  Sense strand starting at position 3226 of SEQ ID NO: 1889030
uguccuugguucuaaaggu

SEQ ID NO: 2574535 - RNA, 19 nt, Artificial Sequence
  Description of Artificial Sequence: Synthetic oligonucleotide
  Antisense strand to SEQ ID NO: 2574534
accuuuagaaccaaggaca

SEQ ID NO: 2574536 - RNA, 19 nt, Artificial Sequence
  Description of Artificial Sequence: Synthetic oligonucleotide
  Sense strand starting at position 3232 of SEQ ID NO: 1889030
ugguucuaaagguguggaa

SEQ ID NO: 2574537 - RNA, 19 nt, Artificial Sequence
  Description of Artificial Sequence: Synthetic oligonucleotide
  Antisense strand to SEQ ID NO: 2574536
uuccacaccuuuagaacca

SEQ ID NO: 2574538 - RNA, 19 nt, Artificial Sequence
  Description of Artificial Sequence: Synthetic oligonucleotide
  Sense strand starting at position 3234 of SEQ ID NO: 1889030
guucuaaagguguggaaag

SEQ ID NO: 2574539 - RNA, 19 nt, Artificial Sequence
  Description of Artificial Sequence: Synthetic oligonucleotide
  Antisense strand to SEQ ID NO: 2574538
cuuuccacaccuuuagaac

SEQ ID NO: 2574540 - RNA, 19 nt, Artificial Sequence
  Description of Artificial Sequence: Synthetic oligonucleotide
  Sense strand starting at position 3235 of SEQ ID NO: 1889030
uucuaaagguguggaaaga

SEQ ID NO: 2574541 - RNA, 19 nt, Artificial Sequence
  Description of Artificial Sequence: Synthetic oligonucleotide
  Antisense strand to SEQ ID NO: 2574540
ucuuuccacaccuuuagaa

SEQ ID NO: 2574542 - RNA, 19 nt, Artificial Sequence
  Description of Artificial Sequence: Synthetic oligonucleotide
  Sense strand starting at position 3252 of SEQ ID NO: 1889030
gagaaauccuguuuagcag

SEQ ID NO: 2574543 - RNA, 19 nt, Artificial Sequence
  Description of Artificial Sequence: Synthetic oligonucleotide
  Antisense strand to SEQ ID NO: 2574542
cugcuaaacaggauuucuc

SEQ ID NO: 2574544 - RNA, 19 nt, Artificial Sequence
  Description of Artificial Sequence: Synthetic oligonucleotide
  Sense strand starting at position 3266 of SEQ ID NO: 1889030
agcagcuauuugccugaga

SEQ ID NO: 2574545 - RNA, 19 nt, Artificial Sequence
  Description of Artificial Sequence: Synthetic oligonucleotide
  Antisense strand to SEQ ID NO: 2574544
ucucaggcaaauagcugcu

SEQ ID NO: 2574546 - RNA, 19 nt, Artificial Sequence
  Description of Artificial Sequence: Synthetic oligonucleotide
  Sense strand starting at position 3267 of SEQ ID NO: 1889030
gcagcuauuugccugagag

SEQ ID NO: 2574547 - RNA, 19 nt, Artificial Sequence
  Description of Artificial Sequence: Synthetic oligonucleotide
  Antisense strand to SEQ ID NO: 2574546
cucucaggcaaauagcugc

SEQ ID NO: 2574548 - RNA, 19 nt, Artificial Sequence
  Description of Artificial Sequence: Synthetic oligonucleotide
  Sense strand starting at position 3335 of SEQ ID NO: 1889030
gggaacucuucccaggaca

SEQ ID NO: 2574549 - RNA, 19 nt, Artificial Sequence
  Description of Artificial Sequence: Synthetic oligonucleotide
  Antisense strand to SEQ ID NO: 2574548
uguccugggaagaguuccc

SEQ ID NO: 2574550 - RNA, 19 nt, Artificial Sequence
  Description of Artificial Sequence: Synthetic oligonucleotide
  Sense strand starting at position 3447 of SEQ ID NO: 1889030
caggguucugcagaggaca

SEQ ID NO: 2574551 - RNA, 19 nt, Artificial Sequence
  Description of Artificial Sequence: Synthetic oligonucleotide
  Antisense strand to SEQ ID NO: 2574550
uguccucugcagaacccug

SEQ ID NO: 2574552 - RNA, 19 nt, Artificial Sequence
  Description of Artificial Sequence: Synthetic oligonucleotide
  Sense strand starting at position 3624 of SEQ ID NO: 1889030
gcacuuuccuccgaagcuu

SEQ ID NO: 2574553 - RNA, 19 nt, Artificial Sequence
  Description of Artificial Sequence: Synthetic oligonucleotide
  Antisense strand to SEQ ID NO: 2574552
aagcuucggaggaaagugc

SEQ ID NO: 2574554 - RNA, 19 nt, Artificial Sequence
  Description of Artificial Sequence: Synthetic oligonucleotide
  Sense strand starting at position 3965 of SEQ ID NO: 1889030
aacagagugugagauccaa

SEQ ID NO: 2574555 - RNA, 19 nt, Artificial Sequence
  Description of Artificial Sequence: Synthetic oligonucleotide
  Antisense strand to SEQ ID NO: 2574554
uuggaucucacacucuguu

SEQ ID NO: 2574556 - RNA, 19 nt, Artificial Sequence
  Description of Artificial Sequence: Synthetic oligonucleotide
  Sense strand starting at position 238 of SEQ ID NO: 1889031
ucaggaaagaugugucauc

SEQ ID NO: 2574557 - RNA, 19 nt, Artificial Sequence
  Description of Artificial Sequence: Synthetic oligonucleotide
  Antisense strand to SEQ ID NO: 2574556
gaugacacaucuuuccuga

SEQ ID NO: 2574558 - RNA, 19 nt, Artificial Sequence
  Description of Artificial Sequence: Synthetic oligonucleotide
  Sense strand starting at position 239 of SEQ ID NO: 1889031
caggaaagaugugucaucu

SEQ ID NO: 2574559 - RNA, 19 nt, Artificial Sequence
  Description of Artificial Sequence: Synthetic oligonucleotide
  Antisense strand to SEQ ID NO: 2574558
agaugacacaucuuuccug

SEQ ID NO: 2574560 - RNA, 19 nt, Artificial Sequence
  Description of Artificial Sequence: Synthetic oligonucleotide
  Sense strand starting at position 273 of SEQ ID NO: 1889031
acauaucaaucaguaagua

SEQ ID NO: 2574561 - RNA, 19 nt, Artificial Sequence
  Description of Artificial Sequence: Synthetic oligonucleotide
  Antisense strand to SEQ ID NO: 2574560
uacuuacugauugauaugu

SEQ ID NO: 2574562 - RNA, 19 nt, Artificial Sequence
  Description of Artificial Sequence: Synthetic oligonucleotide
  Sense strand starting at position 392 of SEQ ID NO: 1889031
cugaucugaucugauuuau

SEQ ID NO: 2574563 - RNA, 19 nt, Artificial Sequence
  Description of Artificial Sequence: Synthetic oligonucleotide
  Antisense strand to SEQ ID NO: 2574562
auaaaucagaucagaucag

SEQ ID NO: 2574564 - RNA, 19 nt, Artificial Sequence
  Description of Artificial Sequence: Synthetic oligonucleotide
  Sense strand starting at position 911 of SEQ ID NO: 1889031
auugaucaucgucaaauua

SEQ ID NO: 2574565 - RNA, 19 nt, Artificial Sequence
  Description of Artificial Sequence: Synthetic oligonucleotide
  Antisense strand to SEQ ID NO: 2574564
uaauuugacgaugaucaau

SEQ ID NO: 2574566 - RNA, 19 nt, Artificial Sequence
  Description of Artificial Sequence: Synthetic oligonucleotide
  Sense strand starting at position 972 of SEQ ID NO: 1889031
aggugucaugauggacaaa

SEQ ID NO: 2574567 - RNA, 19 nt, Artificial Sequence
  Description of Artificial Sequence: Synthetic oligonucleotide
  Antisense strand to SEQ ID NO: 2574566
uuuguccaucaugacaccu

SEQ ID NO: 2574568 - RNA, 19 nt, Artificial Sequence
  Description of Artificial Sequence: Synthetic oligonucleotide
  Sense strand starting at position 1000 of SEQ ID NO: 1889031
aggaaugagccuugaaugu

SEQ ID NO: 2574569 - RNA, 19 nt, Artificial Sequence
  Description of Artificial Sequence: Synthetic oligonucleotide
  Antisense strand to SEQ ID NO: 2574568
acauucaaggcucauuccu

SEQ ID NO: 2574570 - RNA, 19 nt, Artificial Sequence
  Description of Artificial Sequence: Synthetic oligonucleotide
  Sense strand starting at position 1049 of SEQ ID NO: 1889031
ggaauucuaucagcacuag

SEQ ID NO: 2574571 - RNA, 19 nt, Artificial Sequence
  Description of Artificial Sequence: Synthetic oligonucleotide
  Antisense strand to SEQ ID NO: 2574570
cuagugcugauagaauucc

SEQ ID NO: 2574572 - RNA, 19 nt, Artificial Sequence
  Description of Artificial Sequence: Synthetic oligonucleotide
  Sense strand starting at position 1115 of SEQ ID NO: 1889031
cuagcuugucaggaagcua

SEQ ID NO: 2574573 - RNA, 19 nt, Artificial Sequence
  Description of Artificial Sequence: Synthetic oligonucleotide
  Antisense strand to SEQ ID NO: 2574572
uagcuuccugacaagcuag

SEQ ID NO: 2574574 - RNA, 19 nt, Artificial Sequence
  Description of Artificial Sequence: Synthetic oligonucleotide
  Sense strand starting at position 1247 of SEQ ID NO: 1889031
ugagcaaauugcccagaaa

SEQ ID NO: 2574575 - RNA, 19 nt, Artificial Sequence
  Description of Artificial Sequence: Synthetic oligonucleotide
  Antisense strand to SEQ ID NO: 2574574
uuucugggcaauuugcuca

SEQ ID NO: 2574576 - RNA, 19 nt, Artificial Sequence
  Description of Artificial Sequence: Synthetic oligonucleotide
  Sense strand starting at position 1298 of SEQ ID NO: 1889031
augacaaucguagaucauu

SEQ ID NO: 2574577 - RNA, 19 nt, Artificial Sequence
  Description of Artificial Sequence: Synthetic oligonucleotide
  Antisense strand to SEQ ID NO: 2574576
aaugaucuacgauugucau

SEQ ID NO: 2574578 - RNA, 19 nt, Artificial Sequence
  Description of Artificial Sequence: Synthetic oligonucleotide
  Sense strand starting at position 1309 of SEQ ID NO: 1889031
agaucauuccaguaguguc

SEQ ID NO: 2574579 - RNA, 19 nt, Artificial Sequence
  Description of Artificial Sequence: Synthetic oligonucleotide
  Antisense strand to SEQ ID NO: 2574578
gacacuacuggaaugaucu

SEQ ID NO: 2574580 - RNA, 19 nt, Artificial Sequence
  Description of Artificial Sequence: Synthetic oligonucleotide
  Sense strand starting at position 1395 of SEQ ID NO: 1889031
gcuaguaaugauuaugaua

SEQ ID NO: 2574581 - RNA, 19 nt, Artificial Sequence
  Description of Artificial Sequence: Synthetic oligonucleotide
  Antisense strand to SEQ ID NO: 2574580
uaucauaaucauuacuagc

SEQ ID NO: 2574582 - RNA, 19 nt, Artificial Sequence
  Description of Artificial Sequence: Synthetic oligonucleotide
  Sense strand starting at position 1414 of SEQ ID NO: 1889031
auguaauagcgaggauaau

SEQ ID NO: 2574583 - RNA, 19 nt, Artificial Sequence
  Description of Artificial Sequence: Synthetic oligonucleotide
  Antisense strand to SEQ ID NO: 2574582
auuauccucgcuauuacau

SEQ ID NO: 2574584 - RNA, 19 nt, Artificial Sequence
  Description of Artificial Sequence: Synthetic oligonucleotide
  Sense strand starting at position 1415 of SEQ ID NO: 1889031
uguaauagcgaggauaaua

SEQ ID NO: 2574585 - RNA, 19 nt, Artificial Sequence
  Description of Artificial Sequence: Synthetic oligonucleotide
  Antisense strand to SEQ ID NO: 2574584
uauuauccucgcuauuaca

SEQ ID NO: 2574586 - RNA, 19 nt, Artificial Sequence
  Description of Artificial Sequence: Synthetic oligonucleotide
  Sense strand starting at position 2028 of SEQ ID NO: 1889031
ccaugcucuguauagaaga

SEQ ID NO: 2574587 - RNA, 19 nt, Artificial Sequence
  Description of Artificial Sequence: Synthetic oligonucleotide
  Antisense strand to SEQ ID NO: 2574586
ucuucuauacagagcaugg

SEQ ID NO: 2574588 - RNA, 19 nt, Artificial Sequence
  Description of Artificial Sequence: Synthetic oligonucleotide
  Sense strand starting at position 2065 of SEQ ID NO: 1889031
guggguaggugaccagaaa

SEQ ID NO: 2574589 - RNA, 19 nt, Artificial Sequence
  Description of Artificial Sequence: Synthetic oligonucleotide
  Antisense strand to SEQ ID NO: 2574588
uuucuggucaccuacccac

SEQ ID NO: 2574590 - RNA, 19 nt, Artificial Sequence
  Description of Artificial Sequence: Synthetic oligonucleotide
  Sense strand starting at position 2135 of SEQ ID NO: 1889031
gucaacuuccagugaagaa

SEQ ID NO: 2574591 - RNA, 19 nt, Artificial Sequence
  Description of Artificial Sequence: Synthetic oligonucleotide
  Antisense strand to SEQ ID NO: 2574590
uucuucacuggaaguugac

SEQ ID NO: 2574592 - RNA, 19 nt, Artificial Sequence
  Description of Artificial Sequence: Synthetic oligonucleotide
  Sense strand starting at position 2223 of SEQ ID NO: 1889031
uugguaaacucacucaagu

SEQ ID NO: 2574593 - RNA, 19 nt, Artificial Sequence
  Description of Artificial Sequence: Synthetic oligonucleotide
  Antisense strand to SEQ ID NO: 2574592
acuugagugaguuuaccaa

SEQ ID NO: 2574594 - RNA, 19 nt, Artificial Sequence
  Description of Artificial Sequence: Synthetic oligonucleotide
  Sense strand starting at position 2347 of SEQ ID NO: 1889031
accugacauuaguuguuaa

SEQ ID NO: 2574595 - RNA, 19 nt, Artificial Sequence
  Description of Artificial Sequence: Synthetic oligonucleotide
  Antisense strand to SEQ ID NO: 2574594
uuaacaacuaaugucaggu

SEQ ID NO: 2574596 - RNA, 19 nt, Artificial Sequence
  Description of Artificial Sequence: Synthetic oligonucleotide
  Sense strand starting at position 2350 of SEQ ID NO: 1889031
ugacauuaguuguuaaaca

SEQ ID NO: 2574597 - RNA, 19 nt, Artificial Sequence
  Description of Artificial Sequence: Synthetic oligonucleotide
  Antisense strand to SEQ ID NO: 2574596
uguuuaacaacuaauguca

SEQ ID NO: 2574598 - RNA, 19 nt, Artificial Sequence
  Description of Artificial Sequence: Synthetic oligonucleotide
  Sense strand starting at position 2447 of SEQ ID NO: 1889031
uuaccauuugugcgggauc

SEQ ID NO: 2574599 - RNA, 19 nt, Artificial Sequence
  Description of Artificial Sequence: Synthetic oligonucleotide
  Antisense strand to SEQ ID NO: 2574598
gaucccgcacaaaugguaa

SEQ ID NO: 2574600 - RNA, 19 nt, Artificial Sequence
  Description of Artificial Sequence: Synthetic oligonucleotide
  Sense strand starting at position 2577 of SEQ ID NO: 1889031
ggcauauauguugaaugac

SEQ ID NO: 2574601 - RNA, 19 nt, Artificial Sequence
  Description of Artificial Sequence: Synthetic oligonucleotide
  Antisense strand to SEQ ID NO: 2574600
gucauucaacauauaugcc

SEQ ID NO: 2574602 - RNA, 19 nt, Artificial Sequence
  Description of Artificial Sequence: Synthetic oligonucleotide
  Sense strand starting at position 2630 of SEQ ID NO: 1889031
uuuguagaucacuauccuu

SEQ ID NO: 2574603 - RNA, 19 nt, Artificial Sequence
  Description of Artificial Sequence: Synthetic oligonucleotide
  Antisense strand to SEQ ID NO: 2574602
aaggauagugaucuacaaa

SEQ ID NO: 2574604 - RNA, 19 nt, Artificial Sequence
  Description of Artificial Sequence: Synthetic oligonucleotide
  Sense strand starting at position 2633 of SEQ ID NO: 1889031
guagaucacuauccuugaa

SEQ ID NO: 2574605 - RNA, 19 nt, Artificial Sequence
  Description of Artificial Sequence: Synthetic oligonucleotide
  Antisense strand to SEQ ID NO: 2574604
uucaaggauagugaucuac

SEQ ID NO: 2574606 - RNA, 19 nt, Artificial Sequence
  Description of Artificial Sequence: Synthetic oligonucleotide
  Sense strand starting at position 2645 of SEQ ID NO: 1889031
ccuugaauuguuugaagga

SEQ ID NO: 2574607 - RNA, 19 nt, Artificial Sequence
  Description of Artificial Sequence: Synthetic oligonucleotide
  Antisense strand to SEQ ID NO: 2574606
uccuucaaacaauucaagg

SEQ ID NO: 2574608 - RNA, 19 nt, Artificial Sequence
  Description of Artificial Sequence: Synthetic oligonucleotide
  Sense strand starting at position 2803 of SEQ ID NO: 1889031
gcaaauaaucguuaccuuu

SEQ ID NO: 2574609 - RNA, 19 nt, Artificial Sequence
  Description of Artificial Sequence: Synthetic oligonucleotide
  Antisense strand to SEQ ID NO: 2574608
aaagguaacgauuauuugc

SEQ ID NO: 2574610 - RNA, 19 nt, Artificial Sequence
  Description of Artificial Sequence: Synthetic oligonucleotide
  Sense strand starting at position 2894 of SEQ ID NO: 1889031
uuaauaguguucccaccaa

SEQ ID NO: 2574611 - RNA, 19 nt, Artificial Sequence
  Description of Artificial Sequence: Synthetic oligonucleotide
  Antisense strand to SEQ ID NO: 2574610
uuggugggaacacuauuaa

SEQ ID NO: 2574612 - RNA, 19 nt, Artificial Sequence
  Description of Artificial Sequence: Synthetic oligonucleotide
  Sense strand starting at position 3013 of SEQ ID NO: 1889031
ggaauaaucuggccucuag

SEQ ID NO: 2574613 - RNA, 19 nt, Artificial Sequence
  Description of Artificial Sequence: Synthetic oligonucleotide
  Antisense strand to SEQ ID NO: 2574612
cuagaggccagauuauucc

SEQ ID NO: 2574614 - RNA, 19 nt, Artificial Sequence
  Description of Artificial Sequence: Synthetic oligonucleotide
  Sense strand starting at position 3053 of SEQ ID NO: 1889031
uaacccuugguguaugaau

SEQ ID NO: 2574615 - RNA, 19 nt, Artificial Sequence
  Description of Artificial Sequence: Synthetic oligonucleotide
  Antisense strand to SEQ ID NO: 2574614
auucauacaccaaggguua

SEQ ID NO: 2574616 - RNA, 19 nt, Artificial Sequence
  Description of Artificial Sequence: Synthetic oligonucleotide
  Sense strand starting at position 3055 of SEQ ID NO: 1889031
acccuugguguaugaauca

SEQ ID NO: 2574617 - RNA, 19 nt, Artificial Sequence
  Description of Artificial Sequence: Synthetic oligonucleotide
  Antisense strand to SEQ ID NO: 2574616
ugauucauacaccaagggu

SEQ ID NO: 2574618 - RNA, 19 nt, Artificial Sequence
  Description of Artificial Sequence: Synthetic oligonucleotide
  Sense strand starting at position 3066 of SEQ ID NO: 1889031
augaaucaccauugucaug

SEQ ID NO: 2574619 - RNA, 19 nt, Artificial Sequence
  Description of Artificial Sequence: Synthetic oligonucleotide
  Antisense strand to SEQ ID NO: 2574618
caugacaauggugauucau

SEQ ID NO: 2574620 - RNA, 19 nt, Artificial Sequence
  Description of Artificial Sequence: Synthetic oligonucleotide
  Sense strand starting at position 3077 of SEQ ID NO: 1889031
uugucaugucuccacauau

SEQ ID NO: 2574621 - RNA, 19 nt, Artificial Sequence
  Description of Artificial Sequence: Synthetic oligonucleotide
  Antisense strand to SEQ ID NO: 2574620
auauguggagacaugacaa

SEQ ID NO: 2574622 - RNA, 19 nt, Artificial Sequence
  Description of Artificial Sequence: Synthetic oligonucleotide
  Sense strand starting at position 3140 of SEQ ID NO: 1889031
ucauauacagauugugaau

SEQ ID NO: 2574623 - RNA, 19 nt, Artificial Sequence
  Description of Artificial Sequence: Synthetic oligonucleotide
  Antisense strand to SEQ ID NO: 2574622
auucacaaucuguauauga

SEQ ID NO: 2574624 - RNA, 19 nt, Artificial Sequence
  Description of Artificial Sequence: Synthetic oligonucleotide
  Sense strand starting at position 3146 of SEQ ID NO: 1889031
acagauugugaauguucga

SEQ ID NO: 2574625 - RNA, 19 nt, Artificial Sequence
  Description of Artificial Sequence: Synthetic oligonucleotide
  Antisense strand to SEQ ID NO: 2574624
ucgaacauucacaaucugu

SEQ ID NO: 2574626 - RNA, 19 nt, Artificial Sequence
  Description of Artificial Sequence: Synthetic oligonucleotide
  Sense strand starting at position 3218 of SEQ ID NO: 1889031
gcuagcaauguguaagaga

SEQ ID NO: 2574627 - RNA, 19 nt, Artificial Sequence
  Description of Artificial Sequence: Synthetic oligonucleotide
  Antisense strand to SEQ ID NO: 2574626
ucucuuacacauugcuagc

SEQ ID NO: 2574628 - RNA, 19 nt, Artificial Sequence
  Description of Artificial Sequence: Synthetic oligonucleotide
  Sense strand starting at position 3266 of SEQ ID NO: 1889031
ugguucuuacaauagguau

SEQ ID NO: 2574629 - RNA, 19 nt, Artificial Sequence
  Description of Artificial Sequence: Synthetic oligonucleotide
  Antisense strand to SEQ ID NO: 2574628
auaccuauuguaagaacca

SEQ ID NO: 2574630 - RNA, 19 nt, Artificial Sequence
  Description of Artificial Sequence: Synthetic oligonucleotide
  Sense strand starting at position 3521 of SEQ ID NO: 1889031
aagaaaguguacuccagau

SEQ ID NO: 2574631 - RNA, 19 nt, Artificial Sequence
  Description of Artificial Sequence: Synthetic oligonucleotide
  Antisense strand to SEQ ID NO: 2574630
aucuggaguacacuuucuu

SEQ ID NO: 2574632 - RNA, 19 nt, Artificial Sequence
  Description of Artificial Sequence: Synthetic oligonucleotide
  Sense strand starting at position 3565 of SEQ ID NO: 1889031
acucauaaaugggcauauu

SEQ ID NO: 2574633 - RNA, 19 nt, Artificial Sequence
  Description of Artificial Sequence: Synthetic oligonucleotide
  Antisense strand to SEQ ID NO: 2574632
aauaugcccauuuaugagu

SEQ ID NO: 2574634 - RNA, 19 nt, Artificial Sequence
  Description of Artificial Sequence: Synthetic oligonucleotide
  Sense strand starting at position 3922 of SEQ ID NO: 1889031
guaugauaucaacagccuu

SEQ ID NO: 2574635 - RNA, 19 nt, Artificial Sequence
  Description of Artificial Sequence: Synthetic oligonucleotide
  Antisense strand to SEQ ID NO: 2574634
aaggcuguugauaucauac

SEQ ID NO: 2574636 - RNA, 19 nt, Artificial Sequence
  Description of Artificial Sequence: Synthetic oligonucleotide
  Sense strand starting at position 17 of SEQ ID NO: 1889032
ucuagagacucacaaguau

SEQ ID NO: 2574637 - RNA, 19 nt, Artificial Sequence
  Description of Artificial Sequence: Synthetic oligonucleotide
  Antisense strand to SEQ ID NO: 2574636
auacuugugagucucuaga

SEQ ID NO: 2574638 - RNA, 19 nt, Artificial Sequence
  Description of Artificial Sequence: Synthetic oligonucleotide
  Sense strand starting at position 398 of SEQ ID NO: 1889032
uccuccuuaugaggagaaa

SEQ ID NO: 2574639 - RNA, 19 nt, Artificial Sequence
  Description of Artificial Sequence: Synthetic oligonucleotide
  Antisense strand to SEQ ID NO: 2574638
uuucuccucauaaggagga

SEQ ID NO: 2574640 - RNA, 19 nt, Artificial Sequence
  Description of Artificial Sequence: Synthetic oligonucleotide
  Sense strand starting at position 427 of SEQ ID NO: 1889032
acuggagauccaggcaaua

SEQ ID NO: 2574641 - RNA, 19 nt, Artificial Sequence
  Description of Artificial Sequence: Synthetic oligonucleotide
  Antisense strand to SEQ ID NO: 2574640
uauugccuggaucuccagu

SEQ ID NO: 2574642 - RNA, 19 nt, Artificial Sequence
  Description of Artificial Sequence: Synthetic oligonucleotide
  Sense strand starting at position 443 of SEQ ID NO: 1889032
auaacaggcucuuaaagaa

SEQ ID NO: 2574643 - RNA, 19 nt, Artificial Sequence
  Description of Artificial Sequence: Synthetic oligonucleotide
  Antisense strand to SEQ ID NO: 2574642
uucuuuaagagccuguuau

SEQ ID NO: 2574644 - RNA, 19 nt, Artificial Sequence
  Description of Artificial Sequence: Synthetic oligonucleotide
  Sense strand starting at position 474 of SEQ ID NO: 1889032
auuacugagcccuguugaa

SEQ ID NO: 2574645 - RNA, 19 nt, Artificial Sequence
  Description of Artificial Sequence: Synthetic oligonucleotide
  Antisense strand to SEQ ID NO: 2574644
uucaacagggcucaguaau

SEQ ID NO: 2574646 - RNA, 19 nt, Artificial Sequence
  Description of Artificial Sequence: Synthetic oligonucleotide
  Sense strand starting at position 504 of SEQ ID NO: 1889032
aaagucuuggugcagaauu

SEQ ID NO: 2574647 - RNA, 19 nt, Artificial Sequence
  Description of Artificial Sequence: Synthetic oligonucleotide
  Antisense strand to SEQ ID NO: 2574646
aauucugcaccaagacuuu

SEQ ID NO: 2574648 - RNA, 19 nt, Artificial Sequence
  Description of Artificial Sequence: Synthetic oligonucleotide
  Sense strand starting at position 657 of SEQ ID NO: 1889032
agaagccaaugguuugaua

SEQ ID NO: 2574649 - RNA, 19 nt, Artificial Sequence
  Description of Artificial Sequence: Synthetic oligonucleotide
  Antisense strand to SEQ ID NO: 2574648
uaucaaaccauuggcuucu

SEQ ID NO: 2574650 - RNA, 19 nt, Artificial Sequence
  Description of Artificial Sequence: Synthetic oligonucleotide
  Sense strand starting at position 659 of SEQ ID NO: 1889032
aagccaaugguuugauaag

SEQ ID NO: 2574651 - RNA, 19 nt, Artificial Sequence
  Description of Artificial Sequence: Synthetic oligonucleotide
  Antisense strand to SEQ ID NO: 2574650
cuuaucaaaccauuggcuu

SEQ ID NO: 2574652 - RNA, 19 nt, Artificial Sequence
  Description of Artificial Sequence: Synthetic oligonucleotide
  Sense strand starting at position 690 of SEQ ID NO: 1889032
cauuuauguuguccacugu

SEQ ID NO: 2574653 - RNA, 19 nt, Artificial Sequence
  Description of Artificial Sequence: Synthetic oligonucleotide
  Antisense strand to SEQ ID NO: 2574652
acaguggacaacauaaaug

SEQ ID NO: 2574654 - RNA, 19 nt, Artificial Sequence
  Description of Artificial Sequence: Synthetic oligonucleotide
  Sense strand starting at position 730 of SEQ ID NO: 1889032
cuauuauggugccaucuuu

SEQ ID NO: 2574655 - RNA, 19 nt, Artificial Sequence
  Description of Artificial Sequence: Synthetic oligonucleotide
  Antisense strand to SEQ ID NO: 2574654
aaagauggcaccauaauag

SEQ ID NO: 2574656 - RNA, 19 nt, Artificial Sequence
  Description of Artificial Sequence: Synthetic oligonucleotide
  Sense strand starting at position 897 of SEQ ID NO: 1889032
aggccaacucucugaucau

SEQ ID NO: 2574657 - RNA, 19 nt, Artificial Sequence
  Description of Artificial Sequence: Synthetic oligonucleotide
  Antisense strand to SEQ ID NO: 2574656
augaucagagaguuggccu

SEQ ID NO: 2574658 - RNA, 19 nt, Artificial Sequence
  Description of Artificial Sequence: Synthetic oligonucleotide
  Sense strand starting at position 898 of SEQ ID NO: 1889032
ggccaacucucugaucauc

SEQ ID NO: 2574659 - RNA, 19 nt, Artificial Sequence
  Description of Artificial Sequence: Synthetic oligonucleotide
  Antisense strand to SEQ ID NO: 2574658
gaugaucagagaguuggcc

SEQ ID NO: 2574660 - RNA, 19 nt, Artificial Sequence
  Description of Artificial Sequence: Synthetic oligonucleotide
  Sense strand starting at position 1045 of SEQ ID NO: 1889032
ggccuaaugugccuuauuu

SEQ ID NO: 2574661 - RNA, 19 nt, Artificial Sequence
  Description of Artificial Sequence: Synthetic oligonucleotide
  Antisense strand to SEQ ID NO: 2574660
aaauaaggcacauuaggcc

SEQ ID NO: 2574662 - RNA, 19 nt, Artificial Sequence
  Description of Artificial Sequence: Synthetic oligonucleotide
  Sense strand starting at position 1098 of SEQ ID NO: 1889032
uuaauauacuugguuugga

SEQ ID NO: 2574663 - RNA, 19 nt, Artificial Sequence
  Description of Artificial Sequence: Synthetic oligonucleotide
  Antisense strand to SEQ ID NO: 2574662
uccaaaccaaguauauuaa

SEQ ID NO: 2574664 - RNA, 19 nt, Artificial Sequence
  Description of Artificial Sequence: Synthetic oligonucleotide
  Sense strand starting at position 1162 of SEQ ID NO: 1889032
aagccucaucuuuggagua

SEQ ID NO: 2574665 - RNA, 19 nt, Artificial Sequence
  Description of Artificial Sequence: Synthetic oligonucleotide
  Antisense strand to SEQ ID NO: 2574664
uacuccaaagaugaggcuu

SEQ ID NO: 2574666 - RNA, 19 nt, Artificial Sequence
  Description of Artificial Sequence: Synthetic oligonucleotide
  Sense strand starting at position 1174 of SEQ ID NO: 1889032
uggaguacguucuuuccaa

SEQ ID NO: 2574667 - RNA, 19 nt, Artificial Sequence
  Description of Artificial Sequence: Synthetic oligonucleotide
  Antisense strand to SEQ ID NO: 2574666
uuggaaagaacguacucca

SEQ ID NO: 2574668 - RNA, 19 nt, Artificial Sequence
  Description of Artificial Sequence: Synthetic oligonucleotide
  Sense strand starting at position 1175 of SEQ ID NO: 1889032
ggaguacguucuuuccaaa

SEQ ID NO: 2574669 - RNA, 19 nt, Artificial Sequence
  Description of Artificial Sequence: Synthetic oligonucleotide
  Antisense strand to SEQ ID NO: 2574668
uuuggaaagaacguacucc

SEQ ID NO: 2574670 - RNA, 19 nt, Artificial Sequence
  Description of Artificial Sequence: Synthetic oligonucleotide
  Sense strand starting at position 1178 of SEQ ID NO: 1889032
guacguucuuuccaaauau

SEQ ID NO: 2574671 - RNA, 19 nt, Artificial Sequence
  Description of Artificial Sequence: Synthetic oligonucleotide
  Antisense strand to SEQ ID NO: 2574670
auauuuggaaagaacguac

SEQ ID NO: 2574672 - RNA, 19 nt, Artificial Sequence
  Description of Artificial Sequence: Synthetic oligonucleotide
  Sense strand starting at position 1391 of SEQ ID NO: 1889032
ucaguuuauuuguaucuca

SEQ ID NO: 2574673 - RNA, 19 nt, Artificial Sequence
  Description of Artificial Sequence: Synthetic oligonucleotide
  Antisense strand to SEQ ID NO: 2574672
ugagauacaaauaaacuga

SEQ ID NO: 2574674 - RNA, 19 nt, Artificial Sequence
  Description of Artificial Sequence: Synthetic oligonucleotide
  Sense strand starting at position 2270 of SEQ ID NO: 1889032
auacaucacugguugagaa

SEQ ID NO: 2574675 - RNA, 19 nt, Artificial Sequence
  Description of Artificial Sequence: Synthetic oligonucleotide
  Antisense strand to SEQ ID NO: 2574674
uucucaaccagugauguau

SEQ ID NO: 2574676 - RNA, 19 nt, Artificial Sequence
  Description of Artificial Sequence: Synthetic oligonucleotide
  Sense strand starting at position 2271 of SEQ ID NO: 1889032
uacaucacugguugagaaa

SEQ ID NO: 2574677 - RNA, 19 nt, Artificial Sequence
  Description of Artificial Sequence: Synthetic oligonucleotide
  Antisense strand to SEQ ID NO: 2574676
uuucucaaccagugaugua

SEQ ID NO: 2574678 - RNA, 19 nt, Artificial Sequence
  Description of Artificial Sequence: Synthetic oligonucleotide
  Sense strand starting at position 2278 of SEQ ID NO: 1889032
cugguugagaaaugcaguu

SEQ ID NO: 2574679 - RNA, 19 nt, Artificial Sequence
  Description of Artificial Sequence: Synthetic oligonucleotide
  Antisense strand to SEQ ID NO: 2574678
aacugcauuucucaaccag

SEQ ID NO: 2574680 - RNA, 19 nt, Artificial Sequence
  Description of Artificial Sequence: Synthetic oligonucleotide
  Sense strand starting at position 2280 of SEQ ID NO: 1889032
gguugagaaaugcaguuau

SEQ ID NO: 2574681 - RNA, 19 nt, Artificial Sequence
  Description of Artificial Sequence: Synthetic oligonucleotide
  Antisense strand to SEQ ID NO: 2574680
auaacugcauuucucaacc

SEQ ID NO: 2574682 - RNA, 19 nt, Artificial Sequence
  Description of Artificial Sequence: Synthetic oligonucleotide
  Sense strand starting at position 2349 of SEQ ID NO: 1889032
auaagcauuugcuguaaag

SEQ ID NO: 2574683 - RNA, 19 nt, Artificial Sequence
  Description of Artificial Sequence: Synthetic oligonucleotide
  Antisense strand to SEQ ID NO: 2574682
cuuuacagcaaaugcuuau

SEQ ID NO: 2574684 - RNA, 19 nt, Artificial Sequence
  Description of Artificial Sequence: Synthetic oligonucleotide
  Sense strand starting at position 2360 of SEQ ID NO: 1889032
cuguaaagaucuguaauuc

SEQ ID NO: 2574685 - RNA, 19 nt, Artificial Sequence
  Description of Artificial Sequence: Synthetic oligonucleotide
  Antisense strand to SEQ ID NO: 2574684
gaauuacagaucuuuacag

SEQ ID NO: 2574686 - RNA, 19 nt, Artificial Sequence
  Description of Artificial Sequence: Synthetic oligonucleotide
  Sense strand starting at position 2361 of SEQ ID NO: 1889032
uguaaagaucuguaauucu

SEQ ID NO: 2574687 - RNA, 19 nt, Artificial Sequence
  Description of Artificial Sequence: Synthetic oligonucleotide
  Antisense strand to SEQ ID NO: 2574686
agaauuacagaucuuuaca

SEQ ID NO: 2574688 - RNA, 19 nt, Artificial Sequence
  Description of Artificial Sequence: Synthetic oligonucleotide
  Sense strand starting at position 2689 of SEQ ID NO: 1889032
cuguaauucugauauuagc

SEQ ID NO: 2574689 - RNA, 19 nt, Artificial Sequence
  Description of Artificial Sequence: Synthetic oligonucleotide
  Antisense strand to SEQ ID NO: 2574688
gcuaauaucagaauuacag

SEQ ID NO: 2574690 - RNA, 19 nt, Artificial Sequence
  Description of Artificial Sequence: Synthetic oligonucleotide
  Sense strand starting at position 2695 of SEQ ID NO: 1889032
uucugauauuagcagaauu

SEQ ID NO: 2574691 - RNA, 19 nt, Artificial Sequence
  Description of Artificial Sequence: Synthetic oligonucleotide
  Antisense strand to SEQ ID NO: 2574690
aauucugcuaauaucagaa

SEQ ID NO: 2574692 - RNA, 19 nt, Artificial Sequence
  Description of Artificial Sequence: Synthetic oligonucleotide
  Sense strand starting at position 2720 of SEQ ID NO: 1889032
acuuaaguugcagguauau

SEQ ID NO: 2574693 - RNA, 19 nt, Artificial Sequence
  Description of Artificial Sequence: Synthetic oligonucleotide
  Antisense strand to SEQ ID NO: 2574692
auauaccugcaacuuaagu

SEQ ID NO: 2574694 - RNA, 19 nt, Artificial Sequence
  Description of Artificial Sequence: Synthetic oligonucleotide
  Sense strand starting at position 2772 of SEQ ID NO: 1889032
uuggcauugucuuaaauuu

SEQ ID NO: 2574695 - RNA, 19 nt, Artificial Sequence
  Description of Artificial Sequence: Synthetic oligonucleotide
  Antisense strand to SEQ ID NO: 2574694
aaauuuaagacaaugccaa

SEQ ID NO: 2574696 - RNA, 19 nt, Artificial Sequence
  Description of Artificial Sequence: Synthetic oligonucleotide
  Sense strand starting at position 3093 of SEQ ID NO: 1889032
agaacagaauccugaagaa

SEQ ID NO: 2574697 - RNA, 19 nt, Artificial Sequence
  Description of Artificial Sequence: Synthetic oligonucleotide
  Antisense strand to SEQ ID NO: 2574696
uucuucaggauucuguucu

SEQ ID NO: 2574698 - RNA, 19 nt, Artificial Sequence
  Description of Artificial Sequence: Synthetic oligonucleotide
  Sense strand starting at position 3259 of SEQ ID NO: 1889032
cagaguuucuagggccuaa

SEQ ID NO: 2574699 - RNA, 19 nt, Artificial Sequence
  Description of Artificial Sequence: Synthetic oligonucleotide
  Antisense strand to SEQ ID NO: 2574698
uuaggcccuagaaacucug

SEQ ID NO: 2574700 - RNA, 19 nt, Artificial Sequence
  Description of Artificial Sequence: Synthetic oligonucleotide
  Sense strand starting at position 3415 of SEQ ID NO: 1889032
ggcucagagauccaaguca

SEQ ID NO: 2574701 - RNA, 19 nt, Artificial Sequence
  Description of Artificial Sequence: Synthetic oligonucleotide
  Antisense strand to SEQ ID NO: 2574700
ugacuuggaucucugagcc

SEQ ID NO: 2574702 - RNA, 19 nt, Artificial Sequence
  Description of Artificial Sequence: Synthetic oligonucleotide
  Sense strand starting at position 3439 of SEQ ID NO: 1889032
ggguguccucccuacaauu

SEQ ID NO: 2574703 - RNA, 19 nt, Artificial Sequence
  Description of Artificial Sequence: Synthetic oligonucleotide
  Antisense strand to SEQ ID NO: 2574702
aauuguagggaggacaccc

SEQ ID NO: 2574704 - RNA, 19 nt, Artificial Sequence
  Description of Artificial Sequence: Synthetic oligonucleotide
  Sense strand starting at position 188 of SEQ ID NO: 1889033
ugguaucacuguccuagaa

SEQ ID NO: 2574705 - RNA, 19 nt, Artificial Sequence
  Description of Artificial Sequence: Synthetic oligonucleotide
  Antisense strand to SEQ ID NO: 2574704
uucuaggacagugauacca

SEQ ID NO: 2574706 - RNA, 19 nt, Artificial Sequence
  Description of Artificial Sequence: Synthetic oligonucleotide
  Sense strand starting at position 247 of SEQ ID NO: 1889033
agcuaugacucucccagaa

SEQ ID NO: 2574707 - RNA, 19 nt, Artificial Sequence
  Description of Artificial Sequence: Synthetic oligonucleotide
  Antisense strand to SEQ ID NO: 2574706
uucugggagagucauagcu

SEQ ID NO: 2574708 - RNA, 19 nt, Artificial Sequence
  Description of Artificial Sequence: Synthetic oligonucleotide
  Sense strand starting at position 264 of SEQ ID NO: 1889033
aaggaaaucugguaaaggu

SEQ ID NO: 2574709 - RNA, 19 nt, Artificial Sequence
  Description of Artificial Sequence: Synthetic oligonucleotide
  Antisense strand to SEQ ID NO: 2574708
accuuuaccagauuuccuu

SEQ ID NO: 2574710 - RNA, 19 nt, Artificial Sequence
  Description of Artificial Sequence: Synthetic oligonucleotide
  Sense strand starting at position 274 of SEQ ID NO: 1889033
gguaaagguccacagucaa

SEQ ID NO: 2574711 - RNA, 19 nt, Artificial Sequence
  Description of Artificial Sequence: Synthetic oligonucleotide
  Antisense strand to SEQ ID NO: 2574710
uugacuguggaccuuuacc

SEQ ID NO: 2574712 - RNA, 19 nt, Artificial Sequence
  Description of Artificial Sequence: Synthetic oligonucleotide
  Sense strand starting at position 327 of SEQ ID NO: 1889033
gguuaaaugcugcauguga

SEQ ID NO: 2574713 - RNA, 19 nt, Artificial Sequence
  Description of Artificial Sequence: Synthetic oligonucleotide
  Antisense strand to SEQ ID NO: 2574712
ucacaugcagcauuuaacc

SEQ ID NO: 2574714 - RNA, 19 nt, Artificial Sequence
  Description of Artificial Sequence: Synthetic oligonucleotide
  Sense strand starting at position 329 of SEQ ID NO: 1889033
uuaaaugcugcaugugaca

SEQ ID NO: 2574715 - RNA, 19 nt, Artificial Sequence
  Description of Artificial Sequence: Synthetic oligonucleotide
  Antisense strand to SEQ ID NO: 2574714
ugucacaugcagcauuuaa

SEQ ID NO: 2574716 - RNA, 19 nt, Artificial Sequence
  Description of Artificial Sequence: Synthetic oligonucleotide
  Sense strand starting at position 443 of SEQ ID NO: 1889033
ucaauagagcucuaaguau

SEQ ID NO: 2574717 - RNA, 19 nt, Artificial Sequence
  Description of Artificial Sequence: Synthetic oligonucleotide
  Antisense strand to SEQ ID NO: 2574716
auacuuagagcucuauuga

SEQ ID NO: 2574718 - RNA, 19 nt, Artificial Sequence
  Description of Artificial Sequence: Synthetic oligonucleotide
  Sense strand starting at position 599 of SEQ ID NO: 1889033
cugguaccaccuggguaau

SEQ ID NO: 2574719 - RNA, 19 nt, Artificial Sequence
  Description of Artificial Sequence: Synthetic oligonucleotide
  Antisense strand to SEQ ID NO: 2574718
auuacccaggugguaccag

SEQ ID NO: 2574720 - RNA, 19 nt, Artificial Sequence
  Description of Artificial Sequence: Synthetic oligonucleotide
  Sense strand starting at position 600 of SEQ ID NO: 1889033
ugguaccaccuggguaauu

SEQ ID NO: 2574721 - RNA, 19 nt, Artificial Sequence
  Description of Artificial Sequence: Synthetic oligonucleotide
  Antisense strand to SEQ ID NO: 2574720
aauuacccaggugguacca

SEQ ID NO: 2574722 - RNA, 19 nt, Artificial Sequence
  Description of Artificial Sequence: Synthetic oligonucleotide
  Sense strand starting at position 653 of SEQ ID NO: 1889033
accugaacguguuuccaca

SEQ ID NO: 2574723 - RNA, 19 nt, Artificial Sequence
  Description of Artificial Sequence: Synthetic oligonucleotide
  Antisense strand to SEQ ID NO: 2574722
uguggaaacacguucaggu

SEQ ID NO: 2574724 - RNA, 19 nt, Artificial Sequence
  Description of Artificial Sequence: Synthetic oligonucleotide
  Sense strand starting at position 803 of SEQ ID NO: 1889033
cucgcuuccgcugagauga

SEQ ID NO: 2574725 - RNA, 19 nt, Artificial Sequence
  Description of Artificial Sequence: Synthetic oligonucleotide
  Antisense strand to SEQ ID NO: 2574724
ucaucucagcggaagcgag

SEQ ID NO: 2574726 - RNA, 19 nt, Artificial Sequence
  Description of Artificial Sequence: Synthetic oligonucleotide
  Sense strand starting at position 821 of SEQ ID NO: 1889033
aaagcaauugguuaagugu

SEQ ID NO: 2574727 - RNA, 19 nt, Artificial Sequence
  Description of Artificial Sequence: Synthetic oligonucleotide
  Antisense strand to SEQ ID NO: 2574726
acacuuaaccaauugcuuu

SEQ ID NO: 2574728 - RNA, 19 nt, Artificial Sequence
  Description of Artificial Sequence: Synthetic oligonucleotide
  Sense strand starting at position 836 of SEQ ID NO: 1889033
guguuagaucuugggcaau

SEQ ID NO: 2574729 - RNA, 19 nt, Artificial Sequence
  Description of Artificial Sequence: Synthetic oligonucleotide
  Antisense strand to SEQ ID NO: 2574728
auugcccaagaucuaacac

SEQ ID NO: 2574730 - RNA, 19 nt, Artificial Sequence
  Description of Artificial Sequence: Synthetic oligonucleotide
  Sense strand starting at position 838 of SEQ ID NO: 1889033
guuagaucuugggcaauaa

SEQ ID NO: 2574731 - RNA, 19 nt, Artificial Sequence
  Description of Artificial Sequence: Synthetic oligonucleotide
  Antisense strand to SEQ ID NO: 2574730
uuauugcccaagaucuaac

SEQ ID NO: 2574732 - RNA, 19 nt, Artificial Sequence
  Description of Artificial Sequence: Synthetic oligonucleotide
  Sense strand starting at position 947 of SEQ ID NO: 1889033
cggacagggccuuaguuua

SEQ ID NO: 2574733 - RNA, 19 nt, Artificial Sequence
  Description of Artificial Sequence: Synthetic oligonucleotide
  Antisense strand to SEQ ID NO: 2574732
uaaacuaaggcccuguccg

SEQ ID NO: 2574734 - RNA, 19 nt, Artificial Sequence
  Description of Artificial Sequence: Synthetic oligonucleotide
  Sense strand starting at position 954 of SEQ ID NO: 1889033
ggccuuaguuuacugagga

SEQ ID NO: 2574735 - RNA, 19 nt, Artificial Sequence
  Description of Artificial Sequence: Synthetic oligonucleotide
  Antisense strand to SEQ ID NO: 2574734
uccucaguaaacuaaggcc

SEQ ID NO: 2574736 - RNA, 19 nt, Artificial Sequence
  Description of Artificial Sequence: Synthetic oligonucleotide
  Sense strand starting at position 958 of SEQ ID NO: 1889033
uuaguuuacugaggauuug

SEQ ID NO: 2574737 - RNA, 19 nt, Artificial Sequence
  Description of Artificial Sequence: Synthetic oligonucleotide
  Antisense strand to SEQ ID NO: 2574736
caaauccucaguaaacuaa

SEQ ID NO: 2574738 - RNA, 19 nt, Artificial Sequence
  Description of Artificial Sequence: Synthetic oligonucleotide
  Sense strand starting at position 1072 of SEQ ID NO: 1889033
ggagcuguuucucucauga

SEQ ID NO: 2574739 - RNA, 19 nt, Artificial Sequence
  Description of Artificial Sequence: Synthetic oligonucleotide
  Antisense strand to SEQ ID NO: 2574738
ucaugagagaaacagcucc

SEQ ID NO: 2574740 - RNA, 19 nt, Artificial Sequence
  Description of Artificial Sequence: Synthetic oligonucleotide
  Sense strand starting at position 1190 of SEQ ID NO: 1889033
cccgguuucugagugcaga

SEQ ID NO: 2574741 - RNA, 19 nt, Artificial Sequence
  Description of Artificial Sequence: Synthetic oligonucleotide
  Antisense strand to SEQ ID NO: 2574740
ucugcacucagaaaccggg

SEQ ID NO: 2574742 - RNA, 19 nt, Artificial Sequence
  Description of Artificial Sequence: Synthetic oligonucleotide
  Sense strand starting at position 1212 of SEQ ID NO: 1889033
gucauucugugcucuaaug

SEQ ID NO: 2574743 - RNA, 19 nt, Artificial Sequence
  Description of Artificial Sequence: Synthetic oligonucleotide
  Antisense strand to SEQ ID NO: 2574742
cauuagagcacagaaugac

SEQ ID NO: 2574744 - RNA, 19 nt, Artificial Sequence
  Description of Artificial Sequence: Synthetic oligonucleotide
  Sense strand starting at position 1674 of SEQ ID NO: 1889033
uuaggauuaucucccuaag

SEQ ID NO: 2574745 - RNA, 19 nt, Artificial Sequence
  Description of Artificial Sequence: Synthetic oligonucleotide
  Antisense strand to SEQ ID NO: 2574744
cuuagggagauaauccuaa

SEQ ID NO: 2574746 - RNA, 19 nt, Artificial Sequence
  Description of Artificial Sequence: Synthetic oligonucleotide
  Sense strand starting at position 1676 of SEQ ID NO: 1889033
aggauuaucucccuaagca

SEQ ID NO: 2574747 - RNA, 19 nt, Artificial Sequence
  Description of Artificial Sequence: Synthetic oligonucleotide
  Antisense strand to SEQ ID NO: 2574746
ugcuuagggagauaauccu

SEQ ID NO: 2574748 - RNA, 19 nt, Artificial Sequence
  Description of Artificial Sequence: Synthetic oligonucleotide
  Sense strand starting at position 1677 of SEQ ID NO: 1889033
ggauuaucucccuaagcac

SEQ ID NO: 2574749 - RNA, 19 nt, Artificial Sequence
  Description of Artificial Sequence: Synthetic oligonucleotide
  Antisense strand to SEQ ID NO: 2574748
gugcuuagggagauaaucc

SEQ ID NO: 2574750 - RNA, 19 nt, Artificial Sequence
  Description of Artificial Sequence: Synthetic oligonucleotide
  Sense strand starting at position 2388 of SEQ ID NO: 1889033
ucugacuugccugguggaa

SEQ ID NO: 2574751 - RNA, 19 nt, Artificial Sequence
  Description of Artificial Sequence: Synthetic oligonucleotide
  Antisense strand to SEQ ID NO: 2574750
uuccaccaggcaagucaga

SEQ ID NO: 2574752 - RNA, 19 nt, Artificial Sequence
  Description of Artificial Sequence: Synthetic oligonucleotide
  Sense strand starting at position 2403 of SEQ ID NO: 1889033
ggaacaucaaggugucaac

SEQ ID NO: 2574753 - RNA, 19 nt, Artificial Sequence
  Description of Artificial Sequence: Synthetic oligonucleotide
  Antisense strand to SEQ ID NO: 2574752
guugacaccuugauguucc

SEQ ID NO: 2574754 - RNA, 19 nt, Artificial Sequence
  Description of Artificial Sequence: Synthetic oligonucleotide
  Sense strand starting at position 2447 of SEQ ID NO: 1889033
cgggcauggugacuacaaa

SEQ ID NO: 2574755 - RNA, 19 nt, Artificial Sequence
  Description of Artificial Sequence: Synthetic oligonucleotide
  Antisense strand to SEQ ID NO: 2574754
uuuguagucaccaugcccg

SEQ ID NO: 2574756 - RNA, 19 nt, Artificial Sequence
  Description of Artificial Sequence: Synthetic oligonucleotide
  Sense strand starting at position 2475 of SEQ ID NO: 1889033
aagguuccucccuggugua

SEQ ID NO: 2574757 - RNA, 19 nt, Artificial Sequence
  Description of Artificial Sequence: Synthetic oligonucleotide
  Antisense strand to SEQ ID NO: 2574756
uacaccagggaggaaccuu

SEQ ID NO: 2574758 - RNA, 19 nt, Artificial Sequence
  Description of Artificial Sequence: Synthetic oligonucleotide
  Sense strand starting at position 2593 of SEQ ID NO: 1889033
agagccucugcagacauaa

SEQ ID NO: 2574759 - RNA, 19 nt, Artificial Sequence
  Description of Artificial Sequence: Synthetic oligonucleotide
  Antisense strand to SEQ ID NO: 2574758
uuaugucugcagaggcucu

SEQ ID NO: 2574760 - RNA, 19 nt, Artificial Sequence
  Description of Artificial Sequence: Synthetic oligonucleotide
  Sense strand starting at position 2724 of SEQ ID NO: 1889033
accgguguggcuuaacaga

SEQ ID NO: 2574761 - RNA, 19 nt, Artificial Sequence
  Description of Artificial Sequence: Synthetic oligonucleotide
  Antisense strand to SEQ ID NO: 2574760
ucuguuaagccacaccggu

SEQ ID NO: 2574762 - RNA, 19 nt, Artificial Sequence
  Description of Artificial Sequence: Synthetic oligonucleotide
  Sense strand starting at position 2815 of SEQ ID NO: 1889033
gccacuaacgugcaugaaa

SEQ ID NO: 2574763 - RNA, 19 nt, Artificial Sequence
  Description of Artificial Sequence: Synthetic oligonucleotide
  Antisense strand to SEQ ID NO: 2574762
uuucaugcacguuaguggc

SEQ ID NO: 2574764 - RNA, 19 nt, Artificial Sequence
  Description of Artificial Sequence: Synthetic oligonucleotide
  Sense strand starting at position 2817 of SEQ ID NO: 1889033
cacuaacgugcaugaaauu

SEQ ID NO: 2574765 - RNA, 19 nt, Artificial Sequence
  Description of Artificial Sequence: Synthetic oligonucleotide
  Antisense strand to SEQ ID NO: 2574764
aauuucaugcacguuagug

SEQ ID NO: 2574766 - RNA, 19 nt, Artificial Sequence
  Description of Artificial Sequence: Synthetic oligonucleotide
  Sense strand starting at position 2837 of SEQ ID NO: 1889033
gccauuccacugugugauu

SEQ ID NO: 2574767 - RNA, 19 nt, Artificial Sequence
  Description of Artificial Sequence: Synthetic oligonucleotide
  Antisense strand to SEQ ID NO: 2574766
aaucacacaguggaauggc

SEQ ID NO: 2574768 - RNA, 19 nt, Artificial Sequence
  Description of Artificial Sequence: Synthetic oligonucleotide
  Sense strand starting at position 2838 of SEQ ID NO: 1889033
ccauuccacugugugauua

SEQ ID NO: 2574769 - RNA, 19 nt, Artificial Sequence
  Description of Artificial Sequence: Synthetic oligonucleotide
  Antisense strand to SEQ ID NO: 2574768
uaaucacacaguggaaugg

SEQ ID NO: 2574770 - RNA, 19 nt, Artificial Sequence
  Description of Artificial Sequence: Synthetic oligonucleotide
  Sense strand starting at position 2848 of SEQ ID NO: 1889033
gugugauuacgugaguaau

SEQ ID NO: 2574771 - RNA, 19 nt, Artificial Sequence
  Description of Artificial Sequence: Synthetic oligonucleotide
  Antisense strand to SEQ ID NO: 2574770
auuacucacguaaucacac

SEQ ID NO: 2574772 - RNA, 19 nt, Artificial Sequence
  Description of Artificial Sequence: Synthetic oligonucleotide
  Sense strand starting at position 2858 of SEQ ID NO: 1889033
gugaguaaugcccaacugu

SEQ ID NO: 2574773 - RNA, 19 nt, Artificial Sequence
  Description of Artificial Sequence: Synthetic oligonucleotide
  Antisense strand to SEQ ID NO: 2574772
acaguugggcauuacucac

SEQ ID NO: 2574774 - RNA, 19 nt, Artificial Sequence
  Description of Artificial Sequence: Synthetic oligonucleotide
  Sense strand starting at position 2920 of SEQ ID NO: 1889033
uguuuccacucaucgacaa

SEQ ID NO: 2574775 - RNA, 19 nt, Artificial Sequence
  Description of Artificial Sequence: Synthetic oligonucleotide
  Antisense strand to SEQ ID NO: 2574774
uugucgaugaguggaaaca

SEQ ID NO: 2574776 - RNA, 19 nt, Artificial Sequence
  Description of Artificial Sequence: Synthetic oligonucleotide
  Sense strand starting at position 2958 of SEQ ID NO: 1889033
caaggcugugguggugaaa

SEQ ID NO: 2574777 - RNA, 19 nt, Artificial Sequence
  Description of Artificial Sequence: Synthetic oligonucleotide
  Antisense strand to SEQ ID NO: 2574776
uuucaccaccacagccuug

SEQ ID NO: 2574778 - RNA, 19 nt, Artificial Sequence
  Description of Artificial Sequence: Synthetic oligonucleotide
  Sense strand starting at position 2981 of SEQ ID NO: 1889033
ccaagagcugcccaaguau

SEQ ID NO: 2574779 - RNA, 19 nt, Artificial Sequence
  Description of Artificial Sequence: Synthetic oligonucleotide
  Antisense strand to SEQ ID NO: 2574778
auacuugggcagcucuugg

SEQ ID NO: 2574780 - RNA, 19 nt, Artificial Sequence
  Description of Artificial Sequence: Synthetic oligonucleotide
  Sense strand starting at position 3867 of SEQ ID NO: 1889033
agcuacaggcauugaauaa

SEQ ID NO: 2574781 - RNA, 19 nt, Artificial Sequence
  Description of Artificial Sequence: Synthetic oligonucleotide
  Antisense strand to SEQ ID NO: 2574780
uuauucaaugccuguagcu

SEQ ID NO: 2574782 - RNA, 19 nt, Artificial Sequence
  Description of Artificial Sequence: Synthetic oligonucleotide
  Sense strand starting at position 3889 of SEQ ID NO: 1889033
aaagaauuauuugaagggu

SEQ ID NO: 2574783 - RNA, 19 nt, Artificial Sequence
  Description of Artificial Sequence: Synthetic oligonucleotide
  Antisense strand to SEQ ID NO: 2574782
acccuucaaauaauucuuu

SEQ ID NO: 2574784 - RNA, 19 nt, Artificial Sequence
  Description of Artificial Sequence: Synthetic oligonucleotide
  Sense strand starting at position 19 of SEQ ID NO: 1889034
gcaauagcauuaccuguua

SEQ ID NO: 2574785 - RNA, 19 nt, Artificial Sequence
  Description of Artificial Sequence: Synthetic oligonucleotide
  Antisense strand to SEQ ID NO: 2574784
uaacagguaaugcuauugc

SEQ ID NO: 2574786 - RNA, 19 nt, Artificial Sequence
  Description of Artificial Sequence: Synthetic oligonucleotide
  Sense strand starting at position 74 of SEQ ID NO: 1889034
gugaacucgcuugaaucca

SEQ ID NO: 2574787 - RNA, 19 nt, Artificial Sequence
  Description of Artificial Sequence: Synthetic oligonucleotide
  Antisense strand to SEQ ID NO: 2574786
uggauucaagcgaguucac

SEQ ID NO: 2574788 - RNA, 19 nt, Artificial Sequence
  Description of Artificial Sequence: Synthetic oligonucleotide
  Sense strand starting at position 201 of SEQ ID NO: 1889034
guaaguuaugcauauggcu

SEQ ID NO: 2574789 - RNA, 19 nt, Artificial Sequence
  Description of Artificial Sequence: Synthetic oligonucleotide
  Antisense strand to SEQ ID NO: 2574788
agccauaugcauaacuuac

SEQ ID NO: 2574790 - RNA, 19 nt, Artificial Sequence
  Description of Artificial Sequence: Synthetic oligonucleotide
  Sense strand starting at position 207 of SEQ ID NO: 1889034
uaugcauauggcugugaaa

SEQ ID NO: 2574791 - RNA, 19 nt, Artificial Sequence
  Description of Artificial Sequence: Synthetic oligonucleotide
  Antisense strand to SEQ ID NO: 2574790
uuucacagccauaugcaua

SEQ ID NO: 2574792 - RNA, 19 nt, Artificial Sequence
  Description of Artificial Sequence: Synthetic oligonucleotide
  Sense strand starting at position 209 of SEQ ID NO: 1889034
ugcauauggcugugaaaca

SEQ ID NO: 2574793 - RNA, 19 nt, Artificial Sequence
  Description of Artificial Sequence: Synthetic oligonucleotide
  Antisense strand to SEQ ID NO: 2574792
uguuucacagccauaugca

SEQ ID NO: 2574794 - RNA, 19 nt, Artificial Sequence
  Description of Artificial Sequence: Synthetic oligonucleotide
  Sense strand starting at position 496 of SEQ ID NO: 1889034
cccugcacuagacgugaau

SEQ ID NO: 2574795 - RNA, 19 nt, Artificial Sequence
  Description of Artificial Sequence: Synthetic oligonucleotide
  Antisense strand to SEQ ID NO: 2574794
auucacgucuagugcaggg

SEQ ID NO: 2574796 - RNA, 19 nt, Artificial Sequence
  Description of Artificial Sequence: Synthetic oligonucleotide
  Sense strand starting at position 518 of SEQ ID NO: 1889034
ggaguugauuaauuguaaa

SEQ ID NO: 2574797 - RNA, 19 nt, Artificial Sequence
  Description of Artificial Sequence: Synthetic oligonucleotide
  Antisense strand to SEQ ID NO: 2574796
uuuacaauuaaucaacucc

SEQ ID NO: 2574798 - RNA, 19 nt, Artificial Sequence
  Description of Artificial Sequence: Synthetic oligonucleotide
  Sense strand starting at position 902 of SEQ ID NO: 1889034
gcacaugguagccagagaa

SEQ ID NO: 2574799 - RNA, 19 nt, Artificial Sequence
  Description of Artificial Sequence: Synthetic oligonucleotide
  Antisense strand to SEQ ID NO: 2574798
uucucuggcuaccaugugc

SEQ ID NO: 2574800 - RNA, 19 nt, Artificial Sequence
  Description of Artificial Sequence: Synthetic oligonucleotide
  Sense strand starting at position 948 of SEQ ID NO: 1889034
uggauaguguuguuauuag

SEQ ID NO: 2574801 - RNA, 19 nt, Artificial Sequence
  Description of Artificial Sequence: Synthetic oligonucleotide
  Antisense strand to SEQ ID NO: 2574800
cuaauaacaacacuaucca

SEQ ID NO: 2574802 - RNA, 19 nt, Artificial Sequence
  Description of Artificial Sequence: Synthetic oligonucleotide
  Sense strand starting at position 1238 of SEQ ID NO: 1889034
uggaguuguaccuacacag

SEQ ID NO: 2574803 - RNA, 19 nt, Artificial Sequence
  Description of Artificial Sequence: Synthetic oligonucleotide
  Antisense strand to SEQ ID NO: 2574802
cuguguagguacaacucca

SEQ ID NO: 2574804 - RNA, 19 nt, Artificial Sequence
  Description of Artificial Sequence: Synthetic oligonucleotide
  Sense strand starting at position 1279 of SEQ ID NO: 1889034
gcagucugacagcaaugua

SEQ ID NO: 2574805 - RNA, 19 nt, Artificial Sequence
  Description of Artificial Sequence: Synthetic oligonucleotide
  Antisense strand to SEQ ID NO: 2574804
uacauugcugucagacugc

SEQ ID NO: 2574806 - RNA, 19 nt, Artificial Sequence
  Description of Artificial Sequence: Synthetic oligonucleotide
  Sense strand starting at position 1374 of SEQ ID NO: 1889034
gaguucuuucuggagagua

SEQ ID NO: 2574807 - RNA, 19 nt, Artificial Sequence
  Description of Artificial Sequence: Synthetic oligonucleotide
  Antisense strand to SEQ ID NO: 2574806
uacucuccagaaagaacuc

SEQ ID NO: 2574808 - RNA, 19 nt, Artificial Sequence
  Description of Artificial Sequence: Synthetic oligonucleotide
  Sense strand starting at position 1376 of SEQ ID NO: 1889034
guucuuucuggagaguaaa

SEQ ID NO: 2574809 - RNA, 19 nt, Artificial Sequence
  Description of Artificial Sequence: Synthetic oligonucleotide
  Antisense strand to SEQ ID NO: 2574808
uuuacucuccagaaagaac

SEQ ID NO: 2574810 - RNA, 19 nt, Artificial Sequence
  Description of Artificial Sequence: Synthetic oligonucleotide
  Sense strand starting at position 1399 of SEQ ID NO: 1889034
auaauucccuauguguuua

SEQ ID NO: 2574811 - RNA, 19 nt, Artificial Sequence
  Description of Artificial Sequence: Synthetic oligonucleotide
  Antisense strand to SEQ ID NO: 2574810
uaaacacauagggaauuau

SEQ ID NO: 2574812 - RNA, 19 nt, Artificial Sequence
  Description of Artificial Sequence: Synthetic oligonucleotide
  Sense strand starting at position 1802 of SEQ ID NO: 1889034
cucgcaugaucuuuacaau

SEQ ID NO: 2574813 - RNA, 19 nt, Artificial Sequence
  Description of Artificial Sequence: Synthetic oligonucleotide
  Antisense strand to SEQ ID NO: 2574812
auuguaaagaucaugcgag

SEQ ID NO: 2574814 - RNA, 19 nt, Artificial Sequence
  Description of Artificial Sequence: Synthetic oligonucleotide
  Sense strand starting at position 1803 of SEQ ID NO: 1889034
ucgcaugaucuuuacaauc

SEQ ID NO: 2574815 - RNA, 19 nt, Artificial Sequence
  Description of Artificial Sequence: Synthetic oligonucleotide
  Antisense strand to SEQ ID NO: 2574814
gauuguaaagaucaugcga

SEQ ID NO: 2574816 - RNA, 19 nt, Artificial Sequence
  Description of Artificial Sequence: Synthetic oligonucleotide
  Sense strand starting at position 1856 of SEQ ID NO: 1889034
acagcaaucccagaauugu

SEQ ID NO: 2574817 - RNA, 19 nt, Artificial Sequence
  Description of Artificial Sequence: Synthetic oligonucleotide
  Antisense strand to SEQ ID NO: 2574816
acaauucugggauugcugu

SEQ ID NO: 2574818 - RNA, 19 nt, Artificial Sequence
  Description of Artificial Sequence: Synthetic oligonucleotide
  Sense strand starting at position 1864 of SEQ ID NO: 1889034
cccagaauuguccauguca

SEQ ID NO: 2574819 - RNA, 19 nt, Artificial Sequence
  Description of Artificial Sequence: Synthetic oligonucleotide
  Antisense strand to SEQ ID NO: 2574818
ugacauggacaauucuggg

SEQ ID NO: 2574820 - RNA, 19 nt, Artificial Sequence
  Description of Artificial Sequence: Synthetic oligonucleotide
  Sense strand starting at position 1875 of SEQ ID NO: 1889034
ccaugucaaucugucauga

SEQ ID NO: 2574821 - RNA, 19 nt, Artificial Sequence
  Description of Artificial Sequence: Synthetic oligonucleotide
  Antisense strand to SEQ ID NO: 2574820
ucaugacagauugacaugg

SEQ ID NO: 2574822 - RNA, 19 nt, Artificial Sequence
  Description of Artificial Sequence: Synthetic oligonucleotide
  Sense strand starting at position 2046 of SEQ ID NO: 1889034
auuccauugggucaauuau

SEQ ID NO: 2574823 - RNA, 19 nt, Artificial Sequence
  Description of Artificial Sequence: Synthetic oligonucleotide
  Antisense strand to SEQ ID NO: 2574822
auaauugacccaauggaau

SEQ ID NO: 2574824 - RNA, 19 nt, Artificial Sequence
  Description of Artificial Sequence: Synthetic oligonucleotide
  Sense strand starting at position 2054 of SEQ ID NO: 1889034
gggucaauuaucuggguca

SEQ ID NO: 2574825 - RNA, 19 nt, Artificial Sequence
  Description of Artificial Sequence: Synthetic oligonucleotide
  Antisense strand to SEQ ID NO: 2574824
ugacccagauaauugaccc

SEQ ID NO: 2574826 - RNA, 19 nt, Artificial Sequence
  Description of Artificial Sequence: Synthetic oligonucleotide
  Sense strand starting at position 2056 of SEQ ID NO: 1889034
gucaauuaucugggucaag

SEQ ID NO: 2574827 - RNA, 19 nt, Artificial Sequence
  Description of Artificial Sequence: Synthetic oligonucleotide
  Antisense strand to SEQ ID NO: 2574826
cuugacccagauaauugac

SEQ ID NO: 2574828 - RNA, 19 nt, Artificial Sequence
  Description of Artificial Sequence: Synthetic oligonucleotide
  Sense strand starting at position 2125 of SEQ ID NO: 1889034
aguuuaauagcagguuauu

SEQ ID NO: 2574829 - RNA, 19 nt, Artificial Sequence
  Description of Artificial Sequence: Synthetic oligonucleotide
  Antisense strand to SEQ ID NO: 2574828
aauaaccugcuauuaaacu

SEQ ID NO: 2574830 - RNA, 19 nt, Artificial Sequence
  Description of Artificial Sequence: Synthetic oligonucleotide
  Sense strand starting at position 2147 of SEQ ID NO: 1889034
ugaacuaggcguugaguuu

SEQ ID NO: 2574831 - RNA, 19 nt, Artificial Sequence
  Description of Artificial Sequence: Synthetic oligonucleotide
  Antisense strand to SEQ ID NO: 2574830
aaacucaacgccuaguuca

SEQ ID NO: 2574832 - RNA, 19 nt, Artificial Sequence
  Description of Artificial Sequence: Synthetic oligonucleotide
  Sense strand starting at position 2249 of SEQ ID NO: 1889034
cugugaauuccugggcuca

SEQ ID NO: 2574833 - RNA, 19 nt, Artificial Sequence
  Description of Artificial Sequence: Synthetic oligonucleotide
  Antisense strand to SEQ ID NO: 2574832
ugagcccaggaauucacag

SEQ ID NO: 2574834 - RNA, 19 nt, Artificial Sequence
  Description of Artificial Sequence: Synthetic oligonucleotide
  Sense strand starting at position 2291 of SEQ ID NO: 1889034
cuaaauaguuaggacuaca

SEQ ID NO: 2574835 - RNA, 19 nt, Artificial Sequence
  Description of Artificial Sequence: Synthetic oligonucleotide
  Antisense strand to SEQ ID NO: 2574834
uguaguccuaacuauuuag

SEQ ID NO: 2574836 - RNA, 19 nt, Artificial Sequence
  Description of Artificial Sequence: Synthetic oligonucleotide
  Sense strand starting at position 2420 of SEQ ID NO: 1889034
ugcguuggccucucccaaa

SEQ ID NO: 2574837 - RNA, 19 nt, Artificial Sequence
  Description of Artificial Sequence: Synthetic oligonucleotide
  Antisense strand to SEQ ID NO: 2574836
uuugggagaggccaacgca

SEQ ID NO: 2574838 - RNA, 19 nt, Artificial Sequence
  Description of Artificial Sequence: Synthetic oligonucleotide
  Sense strand starting at position 2445 of SEQ ID NO: 1889034
ggauuauaaguaugaagca

SEQ ID NO: 2574839 - RNA, 19 nt, Artificial Sequence
  Description of Artificial Sequence: Synthetic oligonucleotide
  Antisense strand to SEQ ID NO: 2574838
ugcuucauacuuauaaucc

SEQ ID NO: 2574840 - RNA, 19 nt, Artificial Sequence
  Description of Artificial Sequence: Synthetic oligonucleotide
  Sense strand starting at position 2464 of SEQ ID NO: 1889034
cugugccugguuuauauau

SEQ ID NO: 2574841 - RNA, 19 nt, Artificial Sequence
  Description of Artificial Sequence: Synthetic oligonucleotide
  Antisense strand to SEQ ID NO: 2574840
auauauaaaccaggcacag

SEQ ID NO: 2574842 - RNA, 19 nt, Artificial Sequence
  Description of Artificial Sequence: Synthetic oligonucleotide
  Sense strand starting at position 2565 of SEQ ID NO: 1889034
aaaggacagugucuaguau

SEQ ID NO: 2574843 - RNA, 19 nt, Artificial Sequence
  Description of Artificial Sequence: Synthetic oligonucleotide
  Antisense strand to SEQ ID NO: 2574842
auacuagacacuguccuuu

SEQ ID NO: 2574844 - RNA, 19 nt, Artificial Sequence
  Description of Artificial Sequence: Synthetic oligonucleotide
  Sense strand starting at position 2572 of SEQ ID NO: 1889034
agugucuaguauccaguaa

SEQ ID NO: 2574845 - RNA, 19 nt, Artificial Sequence
  Description of Artificial Sequence: Synthetic oligonucleotide
  Antisense strand to SEQ ID NO: 2574844
uuacuggauacuagacacu

SEQ ID NO: 2574846 - RNA, 19 nt, Artificial Sequence
  Description of Artificial Sequence: Synthetic oligonucleotide
  Sense strand starting at position 2573 of SEQ ID NO: 1889034
gugucuaguauccaguaaa

SEQ ID NO: 2574847 - RNA, 19 nt, Artificial Sequence
  Description of Artificial Sequence: Synthetic oligonucleotide
  Antisense strand to SEQ ID NO: 2574846
uuuacuggauacuagacac

SEQ ID NO: 2574848 - RNA, 19 nt, Artificial Sequence
  Description of Artificial Sequence: Synthetic oligonucleotide
  Sense strand starting at position 2736 of SEQ ID NO: 1889034
cuagcuuugccauacaagu

SEQ ID NO: 2574849 - RNA, 19 nt, Artificial Sequence
  Description of Artificial Sequence: Synthetic oligonucleotide
  Antisense strand to SEQ ID NO: 2574848
acuuguauggcaaagcuag

SEQ ID NO: 2574850 - RNA, 19 nt, Artificial Sequence
  Description of Artificial Sequence: Synthetic oligonucleotide
  Sense strand starting at position 2744 of SEQ ID NO: 1889034
gccauacaagucgaaucaa

SEQ ID NO: 2574851 - RNA, 19 nt, Artificial Sequence
  Description of Artificial Sequence: Synthetic oligonucleotide
  Antisense strand to SEQ ID NO: 2574850
uugauucgacuuguauggc

SEQ ID NO: 2574852 - RNA, 19 nt, Artificial Sequence
  Description of Artificial Sequence: Synthetic oligonucleotide
  Sense strand starting at position 3060 of SEQ ID NO: 1889034
aagagaaagugcuuugacu

SEQ ID NO: 2574853 - RNA, 19 nt, Artificial Sequence
  Description of Artificial Sequence: Synthetic oligonucleotide
  Antisense strand to SEQ ID NO: 2574852
agucaaagcacuuucucuu

SEQ ID NO: 2574854 - RNA, 19 nt, Artificial Sequence
  Description of Artificial Sequence: Synthetic oligonucleotide
  Sense strand starting at position 3062 of SEQ ID NO: 1889034
gagaaagugcuuugacuag

SEQ ID NO: 2574855 - RNA, 19 nt, Artificial Sequence
  Description of Artificial Sequence: Synthetic oligonucleotide
  Antisense strand to SEQ ID NO: 2574854
cuagucaaagcacuuucuc

SEQ ID NO: 2574856 - RNA, 19 nt, Artificial Sequence
  Description of Artificial Sequence: Synthetic oligonucleotide
  Sense strand starting at position 3343 of SEQ ID NO: 1889034
ccuagcuuucccuggaguu

SEQ ID NO: 2574857 - RNA, 19 nt, Artificial Sequence
  Description of Artificial Sequence: Synthetic oligonucleotide
  Antisense strand to SEQ ID NO: 2574856
aacuccagggaaagcuagg

SEQ ID NO: 2574858 - RNA, 19 nt, Artificial Sequence
  Description of Artificial Sequence: Synthetic oligonucleotide
  Sense strand starting at position 3344 of SEQ ID NO: 1889034
cuagcuuucccuggaguua

SEQ ID NO: 2574859 - RNA, 19 nt, Artificial Sequence
  Description of Artificial Sequence: Synthetic oligonucleotide
  Antisense strand to SEQ ID NO: 2574858
uaacuccagggaaagcuag

SEQ ID NO: 2574860 - RNA, 19 nt, Artificial Sequence
  Description of Artificial Sequence: Synthetic oligonucleotide
  Sense strand starting at position 3356 of SEQ ID NO: 1889034
ggaguuagucuagaugacc

SEQ ID NO: 2574861 - RNA, 19 nt, Artificial Sequence
  Description of Artificial Sequence: Synthetic oligonucleotide
  Antisense strand to SEQ ID NO: 2574860
ggucaucuagacuaacucc

SEQ ID NO: 2574862 - RNA, 19 nt, Artificial Sequence
  Description of Artificial Sequence: Synthetic oligonucleotide
  Sense strand starting at position 3424 of SEQ ID NO: 1889034
cuacuucugcaguagagga

SEQ ID NO: 2574863 - RNA, 19 nt, Artificial Sequence
  Description of Artificial Sequence: Synthetic oligonucleotide
  Antisense strand to SEQ ID NO: 2574862
uccucuacugcagaaguag

SEQ ID NO: 2574864 - RNA, 19 nt, Artificial Sequence
  Description of Artificial Sequence: Synthetic oligonucleotide
  Sense strand starting at position 1831 of SEQ ID NO: 1889035
agugcaaggucagaaacau

SEQ ID NO: 2574865 - RNA, 19 nt, Artificial Sequence
  Description of Artificial Sequence: Synthetic oligonucleotide
  Antisense strand to SEQ ID NO: 2574864
auguuucugaccuugcacu

SEQ ID NO: 2574866 - RNA, 19 nt, Artificial Sequence
  Description of Artificial Sequence: Synthetic oligonucleotide
  Sense strand starting at position 2062 of SEQ ID NO: 1889035
cuggcaagaugguugucau

SEQ ID NO: 2574867 - RNA, 19 nt, Artificial Sequence
  Description of Artificial Sequence: Synthetic oligonucleotide
  Antisense strand to SEQ ID NO: 2574866
augacaaccaucuugccag

SEQ ID NO: 2574868 - RNA, 19 nt, Artificial Sequence
  Description of Artificial Sequence: Synthetic oligonucleotide
  Sense strand starting at position 2063 of SEQ ID NO: 1889035
uggcaagaugguugucauu

SEQ ID NO: 2574869 - RNA, 19 nt, Artificial Sequence
  Description of Artificial Sequence: Synthetic oligonucleotide
  Antisense strand to SEQ ID NO: 2574868
aaugacaaccaucuugcca

SEQ ID NO: 2574870 - RNA, 19 nt, Artificial Sequence
  Description of Artificial Sequence: Synthetic oligonucleotide
  Sense strand starting at position 2136 of SEQ ID NO: 1889035
ggaagagcuugcuaagacu

SEQ ID NO: 2574871 - RNA, 19 nt, Artificial Sequence
  Description of Artificial Sequence: Synthetic oligonucleotide
  Antisense strand to SEQ ID NO: 2574870
agucuuagcaagcucuucc

SEQ ID NO: 2574872 - RNA, 19 nt, Artificial Sequence
  Description of Artificial Sequence: Synthetic oligonucleotide
  Sense strand starting at position 2156 of SEQ ID NO: 1889035
acucaugcuuuguuuguau

SEQ ID NO: 2574873 - RNA, 19 nt, Artificial Sequence
  Description of Artificial Sequence: Synthetic oligonucleotide
  Antisense strand to SEQ ID NO: 2574872
auacaaacaaagcaugagu

SEQ ID NO: 2574874 - RNA, 19 nt, Artificial Sequence
  Description of Artificial Sequence: Synthetic oligonucleotide
  Sense strand starting at position 2164 of SEQ ID NO: 1889035
uuuguuuguaucugcagga

SEQ ID NO: 2574875 - RNA, 19 nt, Artificial Sequence
  Description of Artificial Sequence: Synthetic oligonucleotide
  Antisense strand to SEQ ID NO: 2574874
uccugcagauacaaacaaa

SEQ ID NO: 2574876 - RNA, 19 nt, Artificial Sequence
  Description of Artificial Sequence: Synthetic oligonucleotide
  Sense strand starting at position 2165 of SEQ ID NO: 1889035
uuguuuguaucugcaggaa

SEQ ID NO: 2574877 - RNA, 19 nt, Artificial Sequence
  Description of Artificial Sequence: Synthetic oligonucleotide
  Antisense strand to SEQ ID NO: 2574876
uuccugcagauacaaacaa

SEQ ID NO: 2574878 - RNA, 19 nt, Artificial Sequence
  Description of Artificial Sequence: Synthetic oligonucleotide
  Sense strand starting at position 2190 of SEQ ID NO: 1889035
cugagugaccacugaaagu

SEQ ID NO: 2574879 - RNA, 19 nt, Artificial Sequence
  Description of Artificial Sequence: Synthetic oligonucleotide
  Antisense strand to SEQ ID NO: 2574878
acuuucaguggucacucag

SEQ ID NO: 2574880 - RNA, 19 nt, Artificial Sequence
  Description of Artificial Sequence: Synthetic oligonucleotide
  Sense strand starting at position 2557 of SEQ ID NO: 1889035
ggaacuguguuggcugagu

SEQ ID NO: 2574881 - RNA, 19 nt, Artificial Sequence
  Description of Artificial Sequence: Synthetic oligonucleotide
  Antisense strand to SEQ ID NO: 2574880
acucagccaacacaguucc

SEQ ID NO: 2574882 - RNA, 19 nt, Artificial Sequence
  Description of Artificial Sequence: Synthetic oligonucleotide
  Sense strand starting at position 2559 of SEQ ID NO: 1889035
aacuguguuggcugaguuu

SEQ ID NO: 2574883 - RNA, 19 nt, Artificial Sequence
  Description of Artificial Sequence: Synthetic oligonucleotide
  Antisense strand to SEQ ID NO: 2574882
aaacucagccaacacaguu

SEQ ID NO: 2574884 - RNA, 19 nt, Artificial Sequence
  Description of Artificial Sequence: Synthetic oligonucleotide
  Sense strand starting at position 2780 of SEQ ID NO: 1889035
augcgaaucuuggcaucua

SEQ ID NO: 2574885 - RNA, 19 nt, Artificial Sequence
  Description of Artificial Sequence: Synthetic oligonucleotide
  Antisense strand to SEQ ID NO: 2574884
uagaugccaagauucgcau

SEQ ID NO: 2574886 - RNA, 19 nt, Artificial Sequence
  Description of Artificial Sequence: Synthetic oligonucleotide
  Sense strand starting at position 2781 of SEQ ID NO: 1889035
ugcgaaucuuggcaucuaa

SEQ ID NO: 2574887 - RNA, 19 nt, Artificial Sequence
  Description of Artificial Sequence: Synthetic oligonucleotide
  Antisense strand to SEQ ID NO: 2574886
uuagaugccaagauucgca

SEQ ID NO: 2574888 - RNA, 19 nt, Artificial Sequence
  Description of Artificial Sequence: Synthetic oligonucleotide
  Sense strand starting at position 2972 of SEQ ID NO: 1889035
aggugagguucacagaaag

SEQ ID NO: 2574889 - RNA, 19 nt, Artificial Sequence
  Description of Artificial Sequence: Synthetic oligonucleotide
  Antisense strand to SEQ ID NO: 2574888
cuuucugugaaccucaccu

SEQ ID NO: 2574890 - RNA, 19 nt, Artificial Sequence
  Description of Artificial Sequence: Synthetic oligonucleotide
  Sense strand starting at position 3164 of SEQ ID NO: 1889035
guuacuuugucuuacgcuu

SEQ ID NO: 2574891 - RNA, 19 nt, Artificial Sequence
  Description of Artificial Sequence: Synthetic oligonucleotide
  Antisense strand to SEQ ID NO: 2574890
aagcguaagacaaaguaac

SEQ ID NO: 2574892 - RNA, 19 nt, Artificial Sequence
  Description of Artificial Sequence: Synthetic oligonucleotide
  Sense strand starting at position 3172 of SEQ ID NO: 1889035
gucuuacgcuuccuauaaa

SEQ ID NO: 2574893 - RNA, 19 nt, Artificial Sequence
  Description of Artificial Sequence: Synthetic oligonucleotide
  Antisense strand to SEQ ID NO: 2574892
uuuauaggaagcguaagac

SEQ ID NO: 2574894 - RNA, 19 nt, Artificial Sequence
  Description of Artificial Sequence: Synthetic oligonucleotide
  Sense strand starting at position 3254 of SEQ ID NO: 1889035
gccgcauuaucauugcaca

SEQ ID NO: 2574895 - RNA, 19 nt, Artificial Sequence
  Description of Artificial Sequence: Synthetic oligonucleotide
  Antisense strand to SEQ ID NO: 2574894
ugugcaaugauaaugcggc

SEQ ID NO: 2574896 - RNA, 19 nt, Artificial Sequence
  Description of Artificial Sequence: Synthetic oligonucleotide
  Sense strand starting at position 3257 of SEQ ID NO: 1889035
gcauuaucauugcacagcu

SEQ ID NO: 2574897 - RNA, 19 nt, Artificial Sequence
  Description of Artificial Sequence: Synthetic oligonucleotide
  Antisense strand to SEQ ID NO: 2574896
agcugugcaaugauaaugc

SEQ ID NO: 2574898 - RNA, 19 nt, Artificial Sequence
  Description of Artificial Sequence: Synthetic oligonucleotide
  Sense strand starting at position 3322 of SEQ ID NO: 1889035
cuccaagccgaguggaaau

SEQ ID NO: 2574899 - RNA, 19 nt, Artificial Sequence
  Description of Artificial Sequence: Synthetic oligonucleotide
  Antisense strand to SEQ ID NO: 2574898
auuuccacucggcuuggag

SEQ ID NO: 2574900 - RNA, 19 nt, Artificial Sequence
  Description of Artificial Sequence: Synthetic oligonucleotide
  Sense strand starting at position 3423 of SEQ ID NO: 1889035
gcacgucgcccggaaauaa

SEQ ID NO: 2574901 - RNA, 19 nt, Artificial Sequence
  Description of Artificial Sequence: Synthetic oligonucleotide
  Antisense strand to SEQ ID NO: 2574900
uuauuuccgggcgacgugc

SEQ ID NO: 2574902 - RNA, 19 nt, Artificial Sequence
  Description of Artificial Sequence: Synthetic oligonucleotide
  Sense strand starting at position 3471 of SEQ ID NO: 1889035
gcguaucuagcgcccgaaa

SEQ ID NO: 2574903 - RNA, 19 nt, Artificial Sequence
  Description of Artificial Sequence: Synthetic oligonucleotide
  Antisense strand to SEQ ID NO: 2574902
uuucgggcgcuagauacgc

SEQ ID NO: 2574904 - RNA, 19 nt, Artificial Sequence
  Description of Artificial Sequence: Synthetic oligonucleotide
  Sense strand starting at position 3568 of SEQ ID NO: 1889035
acaguaauauugcagacua

SEQ ID NO: 2574905 - RNA, 19 nt, Artificial Sequence
  Description of Artificial Sequence: Synthetic oligonucleotide
  Antisense strand to SEQ ID NO: 2574904
uagucugcaauauuacugu

SEQ ID NO: 2574906 - RNA, 19 nt, Artificial Sequence
  Description of Artificial Sequence: Synthetic oligonucleotide
  Sense strand starting at position 3613 of SEQ ID NO: 1889035
agggucaguucccaagaca

SEQ ID NO: 2574907 - RNA, 19 nt, Artificial Sequence
  Description of Artificial Sequence: Synthetic oligonucleotide
  Antisense strand to SEQ ID NO: 2574906
ugucuugggaacugacccu

SEQ ID NO: 2574908 - RNA, 19 nt, Artificial Sequence
  Description of Artificial Sequence: Synthetic oligonucleotide
  Sense strand starting at position 3698 of SEQ ID NO: 1889035
gcccguuucccagcaguga

SEQ ID NO: 2574909 - RNA, 19 nt, Artificial Sequence
  Description of Artificial Sequence: Synthetic oligonucleotide
  Antisense strand to SEQ ID NO: 2574908
ucacugcugggaaacgggc

SEQ ID NO: 2574910 - RNA, 19 nt, Artificial Sequence
  Description of Artificial Sequence: Synthetic oligonucleotide
  Sense strand starting at position 3699 of SEQ ID NO: 1889035
cccguuucccagcagugaa

SEQ ID NO: 2574911 - RNA, 19 nt, Artificial Sequence
  Description of Artificial Sequence: Synthetic oligonucleotide
  Antisense strand to SEQ ID NO: 2574910
uucacugcugggaaacggg

SEQ ID NO: 2574912 - RNA, 19 nt, Artificial Sequence
  Description of Artificial Sequence: Synthetic oligonucleotide
  Sense strand starting at position 3702 of SEQ ID NO: 1889035
guuucccagcagugaaagu

SEQ ID NO: 2574913 - RNA, 19 nt, Artificial Sequence
  Description of Artificial Sequence: Synthetic oligonucleotide
  Antisense strand to SEQ ID NO: 2574912
acuuucacugcugggaaac

SEQ ID NO: 2574914 - RNA, 19 nt, Artificial Sequence
  Description of Artificial Sequence: Synthetic oligonucleotide
  Sense strand starting at position 87 of SEQ ID NO: 1889036
ugauuuggguagucuaguu

SEQ ID NO: 2574915 - RNA, 19 nt, Artificial Sequence
  Description of Artificial Sequence: Synthetic oligonucleotide
  Antisense strand to SEQ ID NO: 2574914
aacuagacuacccaaauca

SEQ ID NO: 2574916 - RNA, 19 nt, Artificial Sequence
  Description of Artificial Sequence: Synthetic oligonucleotide
  Sense strand starting at position 159 of SEQ ID NO: 1889036
aacugaagguagucuuaaa

SEQ ID NO: 2574917 - RNA, 19 nt, Artificial Sequence
  Description of Artificial Sequence: Synthetic oligonucleotide
  Antisense strand to SEQ ID NO: 2574916
uuuaagacuaccuucaguu

SEQ ID NO: 2574918 - RNA, 19 nt, Artificial Sequence
  Description of Artificial Sequence: Synthetic oligonucleotide
  Sense strand starting at position 412 of SEQ ID NO: 1889036
uuuccuacagagugaacua

SEQ ID NO: 2574919 - RNA, 19 nt, Artificial Sequence
  Description of Artificial Sequence: Synthetic oligonucleotide
  Antisense strand to SEQ ID NO: 2574918
uaguucacucuguaggaaa

SEQ ID NO: 2574920 - RNA, 19 nt, Artificial Sequence
  Description of Artificial Sequence: Synthetic oligonucleotide
  Sense strand starting at position 445 of SEQ ID NO: 1889036
aacacuguccacgguuuaa

SEQ ID NO: 2574921 - RNA, 19 nt, Artificial Sequence
  Description of Artificial Sequence: Synthetic oligonucleotide
  Antisense strand to SEQ ID NO: 2574920
uuaaaccguggacaguguu

SEQ ID NO: 2574922 - RNA, 19 nt, Artificial Sequence
  Description of Artificial Sequence: Synthetic oligonucleotide
  Sense strand starting at position 500 of SEQ ID NO: 1889036
uggcaaucacuuugguaga

SEQ ID NO: 2574923 - RNA, 19 nt, Artificial Sequence
  Description of Artificial Sequence: Synthetic oligonucleotide
  Antisense strand to SEQ ID NO: 2574922
ucuaccaaagugauugcca

SEQ ID NO: 2574924 - RNA, 19 nt, Artificial Sequence
  Description of Artificial Sequence: Synthetic oligonucleotide
  Sense strand starting at position 592 of SEQ ID NO: 1889036
gcuugcagucccuaacuua

SEQ ID NO: 2574925 - RNA, 19 nt, Artificial Sequence
  Description of Artificial Sequence: Synthetic oligonucleotide
  Antisense strand to SEQ ID NO: 2574924
uaaguuagggacugcaagc

SEQ ID NO: 2574926 - RNA, 19 nt, Artificial Sequence
  Description of Artificial Sequence: Synthetic oligonucleotide
  Sense strand starting at position 904 of SEQ ID NO: 1889036
aaugcaguuauggguaagu

SEQ ID NO: 2574927 - RNA, 19 nt, Artificial Sequence
  Description of Artificial Sequence: Synthetic oligonucleotide
  Antisense strand to SEQ ID NO: 2574926
acuuacccauaacugcauu

SEQ ID NO: 2574928 - RNA, 19 nt, Artificial Sequence
  Description of Artificial Sequence: Synthetic oligonucleotide
  Sense strand starting at position 906 of SEQ ID NO: 1889036
ugcaguuauggguaagugu

SEQ ID NO: 2574929 - RNA, 19 nt, Artificial Sequence
  Description of Artificial Sequence: Synthetic oligonucleotide
  Antisense strand to SEQ ID NO: 2574928
acacuuacccauaacugca

SEQ ID NO: 2574930 - RNA, 19 nt, Artificial Sequence
  Description of Artificial Sequence: Synthetic oligonucleotide
  Sense strand starting at position 920 of SEQ ID NO: 1889036
aguguugcucauuagucua

SEQ ID NO: 2574931 - RNA, 19 nt, Artificial Sequence
  Description of Artificial Sequence: Synthetic oligonucleotide
  Antisense strand to SEQ ID NO: 2574930
uagacuaaugagcaacacu

SEQ ID NO: 2574932 - RNA, 19 nt, Artificial Sequence
  Description of Artificial Sequence: Synthetic oligonucleotide
  Sense strand starting at position 923 of SEQ ID NO: 1889036
guugcucauuagucuaaga

SEQ ID NO: 2574933 - RNA, 19 nt, Artificial Sequence
  Description of Artificial Sequence: Synthetic oligonucleotide
  Antisense strand to SEQ ID NO: 2574932
ucuuagacuaaugagcaac

SEQ ID NO: 2574934 - RNA, 19 nt, Artificial Sequence
  Description of Artificial Sequence: Synthetic oligonucleotide
  Sense strand starting at position 925 of SEQ ID NO: 1889036
ugcucauuagucuaagaaa

SEQ ID NO: 2574935 - RNA, 19 nt, Artificial Sequence
  Description of Artificial Sequence: Synthetic oligonucleotide
  Antisense strand to SEQ ID NO: 2574934
uuucuuagacuaaugagca

SEQ ID NO: 2574936 - RNA, 19 nt, Artificial Sequence
  Description of Artificial Sequence: Synthetic oligonucleotide
  Sense strand starting at position 949 of SEQ ID NO: 1889036
cugcaaauauagucaguuu

SEQ ID NO: 2574937 - RNA, 19 nt, Artificial Sequence
  Description of Artificial Sequence: Synthetic oligonucleotide
  Antisense strand to SEQ ID NO: 2574936
aaacugacuauauuugcag

SEQ ID NO: 2574938 - RNA, 19 nt, Artificial Sequence
  Description of Artificial Sequence: Synthetic oligonucleotide
  Sense strand starting at position 1012 of SEQ ID NO: 1889036
cgauacugaugaucuggau

SEQ ID NO: 2574939 - RNA, 19 nt, Artificial Sequence
  Description of Artificial Sequence: Synthetic oligonucleotide
  Antisense strand to SEQ ID NO: 2574938
auccagaucaucaguaucg

SEQ ID NO: 2574940 - RNA, 19 nt, Artificial Sequence
  Description of Artificial Sequence: Synthetic oligonucleotide
  Sense strand starting at position 1040 of SEQ ID NO: 1889036
aggugaacccacugcauua

SEQ ID NO: 2574941 - RNA, 19 nt, Artificial Sequence
  Description of Artificial Sequence: Synthetic oligonucleotide
  Antisense strand to SEQ ID NO: 2574940
uaaugcaguggguucaccu

SEQ ID NO: 2574942 - RNA, 19 nt, Artificial Sequence
  Description of Artificial Sequence: Synthetic oligonucleotide
  Sense strand starting at position 1052 of SEQ ID NO: 1889036
ugcauuauuguaugguaaa

SEQ ID NO: 2574943 - RNA, 19 nt, Artificial Sequence
  Description of Artificial Sequence: Synthetic oligonucleotide
  Antisense strand to SEQ ID NO: 2574942
uuuaccauacaauaaugca

SEQ ID NO: 2574944 - RNA, 19 nt, Artificial Sequence
  Description of Artificial Sequence: Synthetic oligonucleotide
  Sense strand starting at position 1091 of SEQ ID NO: 1889036
gguaucagcuuguuaucaa

SEQ ID NO: 2574945 - RNA, 19 nt, Artificial Sequence
  Description of Artificial Sequence: Synthetic oligonucleotide
  Antisense strand to SEQ ID NO: 2574944
uugauaacaagcugauacc

SEQ ID NO: 2574946 - RNA, 19 nt, Artificial Sequence
  Description of Artificial Sequence: Synthetic oligonucleotide
  Sense strand starting at position 1397 of SEQ ID NO: 1889036
ucgcuuagaacucgggaga

SEQ ID NO: 2574947 - RNA, 19 nt, Artificial Sequence
  Description of Artificial Sequence: Synthetic oligonucleotide
  Antisense strand to SEQ ID NO: 2574946
ucucccgaguucuaagcga

SEQ ID NO: 2574948 - RNA, 19 nt, Artificial Sequence
  Description of Artificial Sequence: Synthetic oligonucleotide
  Sense strand starting at position 1528 of SEQ ID NO: 1889036
gaauguuacgagcauaaga

SEQ ID NO: 2574949 - RNA, 19 nt, Artificial Sequence
  Description of Artificial Sequence: Synthetic oligonucleotide
  Antisense strand to SEQ ID NO: 2574948
ucuuaugcucguaacauuc

SEQ ID NO: 2574950 - RNA, 19 nt, Artificial Sequence
  Description of Artificial Sequence: Synthetic oligonucleotide
  Sense strand starting at position 1530 of SEQ ID NO: 1889036
auguuacgagcauaagaua

SEQ ID NO: 2574951 - RNA, 19 nt, Artificial Sequence
  Description of Artificial Sequence: Synthetic oligonucleotide
  Antisense strand to SEQ ID NO: 2574950
uaucuuaugcucguaacau

SEQ ID NO: 2574952 - RNA, 19 nt, Artificial Sequence
  Description of Artificial Sequence: Synthetic oligonucleotide
  Sense strand starting at position 1617 of SEQ ID NO: 1889036
guggaucccagacagguau

SEQ ID NO: 2574953 - RNA, 19 nt, Artificial Sequence
  Description of Artificial Sequence: Synthetic oligonucleotide
  Antisense strand to SEQ ID NO: 2574952
auaccugucugggauccac

SEQ ID NO: 2574954 - RNA, 19 nt, Artificial Sequence
  Description of Artificial Sequence: Synthetic oligonucleotide
  Sense strand starting at position 1619 of SEQ ID NO: 1889036
ggaucccagacagguauau

SEQ ID NO: 2574955 - RNA, 19 nt, Artificial Sequence
  Description of Artificial Sequence: Synthetic oligonucleotide
  Antisense strand to SEQ ID NO: 2574954
auauaccugucugggaucc

SEQ ID NO: 2574956 - RNA, 19 nt, Artificial Sequence
  Description of Artificial Sequence: Synthetic oligonucleotide
  Sense strand starting at position 1660 of SEQ ID NO: 1889036
aaagcuguccuagaccaga

SEQ ID NO: 2574957 - RNA, 19 nt, Artificial Sequence
  Description of Artificial Sequence: Synthetic oligonucleotide
  Antisense strand to SEQ ID NO: 2574956
ucuggucuaggacagcuuu

SEQ ID NO: 2574958 - RNA, 19 nt, Artificial Sequence
  Description of Artificial Sequence: Synthetic oligonucleotide
  Sense strand starting at position 1721 of SEQ ID NO: 1889036
ucauccaucguguagacaa

SEQ ID NO: 2574959 - RNA, 19 nt, Artificial Sequence
  Description of Artificial Sequence: Synthetic oligonucleotide
  Antisense strand to SEQ ID NO: 2574958
uugucuacacgauggauga

SEQ ID NO: 2574960 - RNA, 19 nt, Artificial Sequence
  Description of Artificial Sequence: Synthetic oligonucleotide
  Sense strand starting at position 1879 of SEQ ID NO: 1889036
aguguuacccuaggucaaa

SEQ ID NO: 2574961 - RNA, 19 nt, Artificial Sequence
  Description of Artificial Sequence: Synthetic oligonucleotide
  Antisense strand to SEQ ID NO: 2574960
uuugaccuaggguaacacu

SEQ ID NO: 2574962 - RNA, 19 nt, Artificial Sequence
  Description of Artificial Sequence: Synthetic oligonucleotide
  Sense strand starting at position 1880 of SEQ ID NO: 1889036
guguuacccuaggucaaau

SEQ ID NO: 2574963 - RNA, 19 nt, Artificial Sequence
  Description of Artificial Sequence: Synthetic oligonucleotide
  Antisense strand to SEQ ID NO: 2574962
auuugaccuaggguaacac

SEQ ID NO: 2574964 - RNA, 19 nt, Artificial Sequence
  Description of Artificial Sequence: Synthetic oligonucleotide
  Sense strand starting at position 2026 of SEQ ID NO: 1889036
ccuguacugccagacaacu

SEQ ID NO: 2574965 - RNA, 19 nt, Artificial Sequence
  Description of Artificial Sequence: Synthetic oligonucleotide
  Antisense strand to SEQ ID NO: 2574964
aguugucuggcaguacagg

SEQ ID NO: 2574966 - RNA, 19 nt, Artificial Sequence
  Description of Artificial Sequence: Synthetic oligonucleotide
  Sense strand starting at position 2193 of SEQ ID NO: 1889036
ggaauaguauuaccucacu

SEQ ID NO: 2574967 - RNA, 19 nt, Artificial Sequence
  Description of Artificial Sequence: Synthetic oligonucleotide
  Antisense strand to SEQ ID NO: 2574966
agugagguaauacuauucc

SEQ ID NO: 2574968 - RNA, 19 nt, Artificial Sequence
  Description of Artificial Sequence: Synthetic oligonucleotide
  Sense strand starting at position 2196 of SEQ ID NO: 1889036
auaguauuaccucacugca

SEQ ID NO: 2574969 - RNA, 19 nt, Artificial Sequence
  Description of Artificial Sequence: Synthetic oligonucleotide
  Antisense strand to SEQ ID NO: 2574968
ugcagugagguaauacuau

SEQ ID NO: 2574970 - RNA, 19 nt, Artificial Sequence
  Description of Artificial Sequence: Synthetic oligonucleotide
  Sense strand starting at position 2221 of SEQ ID NO: 1889036
uccucaaguuuauuggaca

SEQ ID NO: 2574971 - RNA, 19 nt, Artificial Sequence
  Description of Artificial Sequence: Synthetic oligonucleotide
  Antisense strand to SEQ ID NO: 2574970
uguccaauaaacuugagga

SEQ ID NO: 2574972 - RNA, 19 nt, Artificial Sequence
  Description of Artificial Sequence: Synthetic oligonucleotide
  Sense strand starting at position 2344 of SEQ ID NO: 1889036
ugaacuaaguaguuuagua

SEQ ID NO: 2574973 - RNA, 19 nt, Artificial Sequence
  Description of Artificial Sequence: Synthetic oligonucleotide
  Antisense strand to SEQ ID NO: 2574972
uacuaaacuacuuaguuca

SEQ ID NO: 2574974 - RNA, 19 nt, Artificial Sequence
  Description of Artificial Sequence: Synthetic oligonucleotide
  Sense strand starting at position 2444 of SEQ ID NO: 1889036
gcaacagcugcuuaacauu

SEQ ID NO: 2574975 - RNA, 19 nt, Artificial Sequence
  Description of Artificial Sequence: Synthetic oligonucleotide
  Antisense strand to SEQ ID NO: 2574974
aauguuaagcagcuguugc

SEQ ID NO: 2574976 - RNA, 19 nt, Artificial Sequence
  Description of Artificial Sequence: Synthetic oligonucleotide
  Sense strand starting at position 2487 of SEQ ID NO: 1889036
uccucuugccuuugaaaga

SEQ ID NO: 2574977 - RNA, 19 nt, Artificial Sequence
  Description of Artificial Sequence: Synthetic oligonucleotide
  Antisense strand to SEQ ID NO: 2574976
ucuuucaaaggcaagagga

SEQ ID NO: 2574978 - RNA, 19 nt, Artificial Sequence
  Description of Artificial Sequence: Synthetic oligonucleotide
  Sense strand starting at position 2743 of SEQ ID NO: 1889036
cgucaacaucguuugcuau

SEQ ID NO: 2574979 - RNA, 19 nt, Artificial Sequence
  Description of Artificial Sequence: Synthetic oligonucleotide
  Antisense strand to SEQ ID NO: 2574978
auagcaaacgauguugacg

SEQ ID NO: 2574980 - RNA, 19 nt, Artificial Sequence
  Description of Artificial Sequence: Synthetic oligonucleotide
  Sense strand starting at position 2924 of SEQ ID NO: 1889036
ccaacauuggcugggaaca

SEQ ID NO: 2574981 - RNA, 19 nt, Artificial Sequence
  Description of Artificial Sequence: Synthetic oligonucleotide
  Antisense strand to SEQ ID NO: 2574980
uguucccagccaauguugg

SEQ ID NO: 2574982 - RNA, 19 nt, Artificial Sequence
  Description of Artificial Sequence: Synthetic oligonucleotide
  Sense strand starting at position 2925 of SEQ ID NO: 1889036
caacauuggcugggaacau

SEQ ID NO: 2574983 - RNA, 19 nt, Artificial Sequence
  Description of Artificial Sequence: Synthetic oligonucleotide
  Antisense strand to SEQ ID NO: 2574982
auguucccagccaauguug

SEQ ID NO: 2574984 - RNA, 19 nt, Artificial Sequence
  Description of Artificial Sequence: Synthetic oligonucleotide
  Sense strand starting at position 3124 of SEQ ID NO: 1889036
agccaaacuuucucgagaa

SEQ ID NO: 2574985 - RNA, 19 nt, Artificial Sequence
  Description of Artificial Sequence: Synthetic oligonucleotide
  Antisense strand to SEQ ID NO: 2574984
uucucgagaaaguuuggcu

SEQ ID NO: 2574986 - RNA, 19 nt, Artificial Sequence
  Description of Artificial Sequence: Synthetic oligonucleotide
  Sense strand starting at position 3476 of SEQ ID NO: 1889036
acuuuauacugcccgggaa

SEQ ID NO: 2574987 - RNA, 19 nt, Artificial Sequence
  Description of Artificial Sequence: Synthetic oligonucleotide
  Antisense strand to SEQ ID NO: 2574986
uucccgggcaguauaaagu

SEQ ID NO: 2574988 - RNA, 19 nt, Artificial Sequence
  Description of Artificial Sequence: Synthetic oligonucleotide
  Sense strand starting at position 3748 of SEQ ID NO: 1889036
guuuauugagcguccuagu

SEQ ID NO: 2574989 - RNA, 19 nt, Artificial Sequence
  Description of Artificial Sequence: Synthetic oligonucleotide
  Antisense strand to SEQ ID NO: 2574988
acuaggacgcucaauaaac

SEQ ID NO: 2574990 - RNA, 19 nt, Artificial Sequence
  Description of Artificial Sequence: Synthetic oligonucleotide
  Sense strand starting at position 3825 of SEQ ID NO: 1889036
aaaugugaugaggguagau

SEQ ID NO: 2574991 - RNA, 19 nt, Artificial Sequence
  Description of Artificial Sequence: Synthetic oligonucleotide
  Antisense strand to SEQ ID NO: 2574990
aucuacccucaucacauuu

SEQ ID NO: 2574992 - RNA, 19 nt, Artificial Sequence
  Description of Artificial Sequence: Synthetic oligonucleotide
  Sense strand starting at position 3944 of SEQ ID NO: 1889036
gggaauuucugauaaauac

SEQ ID NO: 2574993 - RNA, 19 nt, Artificial Sequence
  Description of Artificial Sequence: Synthetic oligonucleotide
  Antisense strand to SEQ ID NO: 2574992
guauuuaucagaaauuccc

SEQ ID NO: 2574994 - RNA, 19 nt, Artificial Sequence
  Description of Artificial Sequence: Synthetic oligonucleotide
  Sense strand starting at position 40 of SEQ ID NO: 1889037
agaauugggucugaauuug

SEQ ID NO: 2574995 - RNA, 19 nt, Artificial Sequence
  Description of Artificial Sequence: Synthetic oligonucleotide
  Antisense strand to SEQ ID NO: 2574994
caaauucagacccaauucu

SEQ ID NO: 2574996 - RNA, 19 nt, Artificial Sequence
  Description of Artificial Sequence: Synthetic oligonucleotide
  Sense strand starting at position 334 of SEQ ID NO: 1889037
ucaauauaacugggucauu

SEQ ID NO: 2574997 - RNA, 19 nt, Artificial Sequence
  Description of Artificial Sequence: Synthetic oligonucleotide
  Antisense strand to SEQ ID NO: 2574996
aaugacccaguuauauuga

SEQ ID NO: 2574998 - RNA, 19 nt, Artificial Sequence
  Description of Artificial Sequence: Synthetic oligonucleotide
  Sense strand starting at position 346 of SEQ ID NO: 1889037
ggucauuuguuacuguaca

SEQ ID NO: 2574999 - RNA, 19 nt, Artificial Sequence
  Description of Artificial Sequence: Synthetic oligonucleotide
  Antisense strand to SEQ ID NO: 2574998
uguacaguaacaaaugacc

SEQ ID NO: 2575000 - RNA, 19 nt, Artificial Sequence
  Description of Artificial Sequence: Synthetic oligonucleotide
  Sense strand starting at position 354 of SEQ ID NO: 1889037
guuacuguacaccauaaca

SEQ ID NO: 2575001 - RNA, 19 nt, Artificial Sequence
  Description of Artificial Sequence: Synthetic oligonucleotide
  Antisense strand to SEQ ID NO: 2575000
uguuaugguguacaguaac

SEQ ID NO: 2575002 - RNA, 19 nt, Artificial Sequence
  Description of Artificial Sequence: Synthetic oligonucleotide
  Sense strand starting at position 427 of SEQ ID NO: 1889037
cgauaugaccacugacaau

SEQ ID NO: 2575003 - RNA, 19 nt, Artificial Sequence
  Description of Artificial Sequence: Synthetic oligonucleotide
  Antisense strand to SEQ ID NO: 2575002
auugucaguggucauaucg

SEQ ID NO: 2575004 - RNA, 19 nt, Artificial Sequence
  Description of Artificial Sequence: Synthetic oligonucleotide
  Sense strand starting at position 464 of SEQ ID NO: 1889037
aagauaugagauugucucu

SEQ ID NO: 2575005 - RNA, 19 nt, Artificial Sequence
  Description of Artificial Sequence: Synthetic oligonucleotide
  Antisense strand to SEQ ID NO: 2575004
agagacaaucucauaucuu

SEQ ID NO: 2575006 - RNA, 19 nt, Artificial Sequence
  Description of Artificial Sequence: Synthetic oligonucleotide
  Sense strand starting at position 469 of SEQ ID NO: 1889037
augagauugucucuaccuu

SEQ ID NO: 2575007 - RNA, 19 nt, Artificial Sequence
  Description of Artificial Sequence: Synthetic oligonucleotide
  Antisense strand to SEQ ID NO: 2575006
aagguagagacaaucucau

SEQ ID NO: 2575008 - RNA, 19 nt, Artificial Sequence
  Description of Artificial Sequence: Synthetic oligonucleotide
  Sense strand starting at position 470 of SEQ ID NO: 1889037
ugagauugucucuaccuuc

SEQ ID NO: 2575009 - RNA, 19 nt, Artificial Sequence
  Description of Artificial Sequence: Synthetic oligonucleotide
  Antisense strand to SEQ ID NO: 2575008
gaagguagagacaaucuca

SEQ ID NO: 2575010 - RNA, 19 nt, Artificial Sequence
  Description of Artificial Sequence: Synthetic oligonucleotide
  Sense strand starting at position 536 of SEQ ID NO: 1889037
ccguguguucucuuaaguu

SEQ ID NO: 2575011 - RNA, 19 nt, Artificial Sequence
  Description of Artificial Sequence: Synthetic oligonucleotide
  Antisense strand to SEQ ID NO: 2575010
aacuuaagagaacacacgg

SEQ ID NO: 2575012 - RNA, 19 nt, Artificial Sequence
  Description of Artificial Sequence: Synthetic oligonucleotide
  Sense strand starting at position 588 of SEQ ID NO: 1889037
ugaacugaauuggaauuua

SEQ ID NO: 2575013 - RNA, 19 nt, Artificial Sequence
  Description of Artificial Sequence: Synthetic oligonucleotide
  Antisense strand to SEQ ID NO: 2575012
uaaauuccaauucaguuca

SEQ ID NO: 2575014 - RNA, 19 nt, Artificial Sequence
  Description of Artificial Sequence: Synthetic oligonucleotide
  Sense strand starting at position 604 of SEQ ID NO: 1889037
uuagaaaccuggucuacaa

SEQ ID NO: 2575015 - RNA, 19 nt, Artificial Sequence
  Description of Artificial Sequence: Synthetic oligonucleotide
  Antisense strand to SEQ ID NO: 2575014
uuguagaccagguuucuaa

SEQ ID NO: 2575016 - RNA, 19 nt, Artificial Sequence
  Description of Artificial Sequence: Synthetic oligonucleotide
  Sense strand starting at position 740 of SEQ ID NO: 1889037
guuaauuaaugagcacuau

SEQ ID NO: 2575017 - RNA, 19 nt, Artificial Sequence
  Description of Artificial Sequence: Synthetic oligonucleotide
  Antisense strand to SEQ ID NO: 2575016
auagugcucauuaauuaac

SEQ ID NO: 2575018 - RNA, 19 nt, Artificial Sequence
  Description of Artificial Sequence: Synthetic oligonucleotide
  Sense strand starting at position 804 of SEQ ID NO: 1889037
ggguucuggagucagauau

SEQ ID NO: 2575019 - RNA, 19 nt, Artificial Sequence
  Description of Artificial Sequence: Synthetic oligonucleotide
  Antisense strand to SEQ ID NO: 2575018
auaucugacuccagaaccc

SEQ ID NO: 2575020 - RNA, 19 nt, Artificial Sequence
  Description of Artificial Sequence: Synthetic oligonucleotide
  Sense strand starting at position 833 of SEQ ID NO: 1889037
ggauccuggcuccacuaua

SEQ ID NO: 2575021 - RNA, 19 nt, Artificial Sequence
  Description of Artificial Sequence: Synthetic oligonucleotide
  Antisense strand to SEQ ID NO: 2575020
uauaguggagccaggaucc

SEQ ID NO: 2575022 - RNA, 19 nt, Artificial Sequence
  Description of Artificial Sequence: Synthetic oligonucleotide
  Sense strand starting at position 858 of SEQ ID NO: 1889037
uugugugacauuugggcaa

SEQ ID NO: 2575023 - RNA, 19 nt, Artificial Sequence
  Description of Artificial Sequence: Synthetic oligonucleotide
  Antisense strand to SEQ ID NO: 2575022
uugcccaaaugucacacaa

SEQ ID NO: 2575024 - RNA, 19 nt, Artificial Sequence
  Description of Artificial Sequence: Synthetic oligonucleotide
  Sense strand starting at position 1019 of SEQ ID NO: 1889037
gucaaagaacucugauuga

SEQ ID NO: 2575025 - RNA, 19 nt, Artificial Sequence
  Description of Artificial Sequence: Synthetic oligonucleotide
  Antisense strand to SEQ ID NO: 2575024
ucaaucagaguucuuugac

SEQ ID NO: 2575026 - RNA, 19 nt, Artificial Sequence
  Description of Artificial Sequence: Synthetic oligonucleotide
  Sense strand starting at position 1065 of SEQ ID NO: 1889037
auauuauggcucuggugaa

SEQ ID NO: 2575027 - RNA, 19 nt, Artificial Sequence
  Description of Artificial Sequence: Synthetic oligonucleotide
  Antisense strand to SEQ ID NO: 2575026
uucaccagagccauaauau

SEQ ID NO: 2575028 - RNA, 19 nt, Artificial Sequence
  Description of Artificial Sequence: Synthetic oligonucleotide
  Sense strand starting at position 1131 of SEQ ID NO: 1889037
aguuaucuucucuaggaau

SEQ ID NO: 2575029 - RNA, 19 nt, Artificial Sequence
  Description of Artificial Sequence: Synthetic oligonucleotide
  Antisense strand to SEQ ID NO: 2575028
auuccuagagaagauaacu

SEQ ID NO: 2575030 - RNA, 19 nt, Artificial Sequence
  Description of Artificial Sequence: Synthetic oligonucleotide
  Sense strand starting at position 1275 of SEQ ID NO: 1889037
uggagaauauaagaauaga

SEQ ID NO: 2575031 - RNA, 19 nt, Artificial Sequence
  Description of Artificial Sequence: Synthetic oligonucleotide
  Antisense strand to SEQ ID NO: 2575030
ucuauucuuauauucucca

SEQ ID NO: 2575032 - RNA, 19 nt, Artificial Sequence
  Description of Artificial Sequence: Synthetic oligonucleotide
  Sense strand starting at position 1438 of SEQ ID NO: 1889037
cucagaguuacagggaguu

SEQ ID NO: 2575033 - RNA, 19 nt, Artificial Sequence
  Description of Artificial Sequence: Synthetic oligonucleotide
  Antisense strand to SEQ ID NO: 2575032
aacucccuguaacucugag

SEQ ID NO: 2575034 - RNA, 19 nt, Artificial Sequence
  Description of Artificial Sequence: Synthetic oligonucleotide
  Sense strand starting at position 1676 of SEQ ID NO: 1889037
cuaaaucauguuugaugga

SEQ ID NO: 2575035 - RNA, 19 nt, Artificial Sequence
  Description of Artificial Sequence: Synthetic oligonucleotide
  Antisense strand to SEQ ID NO: 2575034
uccaucaaacaugauuuag

SEQ ID NO: 2575036 - RNA, 19 nt, Artificial Sequence
  Description of Artificial Sequence: Synthetic oligonucleotide
  Sense strand starting at position 2013 of SEQ ID NO: 1889037
uugauugaguauucuuauc

SEQ ID NO: 2575037 - RNA, 19 nt, Artificial Sequence
  Description of Artificial Sequence: Synthetic oligonucleotide
  Antisense strand to SEQ ID NO: 2575036
gauaagaauacucaaucaa

SEQ ID NO: 2575038 - RNA, 19 nt, Artificial Sequence
  Description of Artificial Sequence: Synthetic oligonucleotide
  Sense strand starting at position 2114 of SEQ ID NO: 1889037
aaagcaugauacuuagagu

SEQ ID NO: 2575039 - RNA, 19 nt, Artificial Sequence
  Description of Artificial Sequence: Synthetic oligonucleotide
  Antisense strand to SEQ ID NO: 2575038
acucuaaguaucaugcuuu

SEQ ID NO: 2575040 - RNA, 19 nt, Artificial Sequence
  Description of Artificial Sequence: Synthetic oligonucleotide
  Sense strand starting at position 2132 of SEQ ID NO: 1889037
uaggcuuuguuauuaaaga

SEQ ID NO: 2575041 - RNA, 19 nt, Artificial Sequence
  Description of Artificial Sequence: Synthetic oligonucleotide
  Antisense strand to SEQ ID NO: 2575040
ucuuuaauaacaaagccua

SEQ ID NO: 2575042 - RNA, 19 nt, Artificial Sequence
  Description of Artificial Sequence: Synthetic oligonucleotide
  Sense strand starting at position 2142 of SEQ ID NO: 1889037
uauuaaagacagugaguau

SEQ ID NO: 2575043 - RNA, 19 nt, Artificial Sequence
  Description of Artificial Sequence: Synthetic oligonucleotide
  Antisense strand to SEQ ID NO: 2575042
auacucacugucuuuaaua

SEQ ID NO: 2575044 - RNA, 19 nt, Artificial Sequence
  Description of Artificial Sequence: Synthetic oligonucleotide
  Sense strand starting at position 2242 of SEQ ID NO: 1889037
ucaugacuuggcuaaauua

SEQ ID NO: 2575045 - RNA, 19 nt, Artificial Sequence
  Description of Artificial Sequence: Synthetic oligonucleotide
  Antisense strand to SEQ ID NO: 2575044
uaauuuagccaagucauga

SEQ ID NO: 2575046 - RNA, 19 nt, Artificial Sequence
  Description of Artificial Sequence: Synthetic oligonucleotide
  Sense strand starting at position 2476 of SEQ ID NO: 1889037
guuggaauaucccuuauuc

SEQ ID NO: 2575047 - RNA, 19 nt, Artificial Sequence
  Description of Artificial Sequence: Synthetic oligonucleotide
  Antisense strand to SEQ ID NO: 2575046
gaauaagggauauuccaac

SEQ ID NO: 2575048 - RNA, 19 nt, Artificial Sequence
  Description of Artificial Sequence: Synthetic oligonucleotide
  Sense strand starting at position 2555 of SEQ ID NO: 1889037
gcauuauacugguugaaca

SEQ ID NO: 2575049 - RNA, 19 nt, Artificial Sequence
  Description of Artificial Sequence: Synthetic oligonucleotide
  Antisense strand to SEQ ID NO: 2575048
uguucaaccaguauaaugc

SEQ ID NO: 2575050 - RNA, 19 nt, Artificial Sequence
  Description of Artificial Sequence: Synthetic oligonucleotide
  Sense strand starting at position 2600 of SEQ ID NO: 1889037
aaguauuuccuuuaagcgu

SEQ ID NO: 2575051 - RNA, 19 nt, Artificial Sequence
  Description of Artificial Sequence: Synthetic oligonucleotide
  Antisense strand to SEQ ID NO: 2575050
acgcuuaaaggaaauacuu

SEQ ID NO: 2575052 - RNA, 19 nt, Artificial Sequence
  Description of Artificial Sequence: Synthetic oligonucleotide
  Sense strand starting at position 2737 of SEQ ID NO: 1889037
uuacaauaugccuaaagug

SEQ ID NO: 2575053 - RNA, 19 nt, Artificial Sequence
  Description of Artificial Sequence: Synthetic oligonucleotide
  Antisense strand to SEQ ID NO: 2575052
cacuuuaggcauauuguaa

SEQ ID NO: 2575054 - RNA, 19 nt, Artificial Sequence
  Description of Artificial Sequence: Synthetic oligonucleotide
  Sense strand starting at position 2834 of SEQ ID NO: 1889037
aguauaugacagugacucu

SEQ ID NO: 2575055 - RNA, 19 nt, Artificial Sequence
  Description of Artificial Sequence: Synthetic oligonucleotide
  Antisense strand to SEQ ID NO: 2575054
agagucacugucauauacu

SEQ ID NO: 2575056 - RNA, 19 nt, Artificial Sequence
  Description of Artificial Sequence: Synthetic oligonucleotide
  Sense strand starting at position 2878 of SEQ ID NO: 1889037
agggucaauccacauguua

SEQ ID NO: 2575057 - RNA, 19 nt, Artificial Sequence
  Description of Artificial Sequence: Synthetic oligonucleotide
  Antisense strand to SEQ ID NO: 2575056
uaacauguggauugacccu

SEQ ID NO: 2575058 - RNA, 19 nt, Artificial Sequence
  Description of Artificial Sequence: Synthetic oligonucleotide
  Sense strand starting at position 3115 of SEQ ID NO: 1889037
aaguaccuacugugaguaa

SEQ ID NO: 2575059 - RNA, 19 nt, Artificial Sequence
  Description of Artificial Sequence: Synthetic oligonucleotide
  Antisense strand to SEQ ID NO: 2575058
uuacucacaguagguacuu

SEQ ID NO: 2575060 - RNA, 19 nt, Artificial Sequence
  Description of Artificial Sequence: Synthetic oligonucleotide
  Sense strand starting at position 3119 of SEQ ID NO: 1889037
accuacugugaguaaggua

SEQ ID NO: 2575061 - RNA, 19 nt, Artificial Sequence
  Description of Artificial Sequence: Synthetic oligonucleotide
  Antisense strand to SEQ ID NO: 2575060
uaccuuacucacaguaggu

SEQ ID NO: 2575062 - RNA, 19 nt, Artificial Sequence
  Description of Artificial Sequence: Synthetic oligonucleotide
  Sense strand starting at position 3124 of SEQ ID NO: 1889037
cugugaguaagguacuaua

SEQ ID NO: 2575063 - RNA, 19 nt, Artificial Sequence
  Description of Artificial Sequence: Synthetic oligonucleotide
  Antisense strand to SEQ ID NO: 2575062
uauaguaccuuacucacag

SEQ ID NO: 2575064 - RNA, 19 nt, Artificial Sequence
  Description of Artificial Sequence: Synthetic oligonucleotide
  Sense strand starting at position 3204 of SEQ ID NO: 1889037
cagugaugaucagugagau

SEQ ID NO: 2575065 - RNA, 19 nt, Artificial Sequence
  Description of Artificial Sequence: Synthetic oligonucleotide
  Antisense strand to SEQ ID NO: 2575064
aucucacugaucaucacug

SEQ ID NO: 2575066 - RNA, 19 nt, Artificial Sequence
  Description of Artificial Sequence: Synthetic oligonucleotide
  Sense strand starting at position 3205 of SEQ ID NO: 1889037
agugaugaucagugagauu

SEQ ID NO: 2575067 - RNA, 19 nt, Artificial Sequence
  Description of Artificial Sequence: Synthetic oligonucleotide
  Antisense strand to SEQ ID NO: 2575066
aaucucacugaucaucacu

SEQ ID NO: 2575068 - RNA, 19 nt, Artificial Sequence
  Description of Artificial Sequence: Synthetic oligonucleotide
  Sense strand starting at position 3578 of SEQ ID NO: 1889037
agguaagagagcugacaua

SEQ ID NO: 2575069 - RNA, 19 nt, Artificial Sequence
  Description of Artificial Sequence: Synthetic oligonucleotide
  Antisense strand to SEQ ID NO: 2575068
uaugucagcucucuuaccu

SEQ ID NO: 2575070 - RNA, 19 nt, Artificial Sequence
  Description of Artificial Sequence: Synthetic oligonucleotide
  Sense strand starting at position 3650 of SEQ ID NO: 1889037
ucagaaugucagcaaauca

SEQ ID NO: 2575071 - RNA, 19 nt, Artificial Sequence
  Description of Artificial Sequence: Synthetic oligonucleotide
  Antisense strand to SEQ ID NO: 2575070
ugauuugcugacauucuga

SEQ ID NO: 2575072 - RNA, 19 nt, Artificial Sequence
  Description of Artificial Sequence: Synthetic oligonucleotide
  Sense strand starting at position 3913 of SEQ ID NO: 1889037
uuauuagugggaugcuaag

SEQ ID NO: 2575073 - RNA, 19 nt, Artificial Sequence
  Description of Artificial Sequence: Synthetic oligonucleotide
  Antisense strand to SEQ ID NO: 2575072
cuuagcaucccacuaauaa

SEQ ID NO: 2575074 - RNA, 19 nt, Artificial Sequence
  Description of Artificial Sequence: Synthetic oligonucleotide
  Sense strand starting at position 35 of SEQ ID NO: 1889038
gacugugcucugggucaga

SEQ ID NO: 2575075 - RNA, 19 nt, Artificial Sequence
  Description of Artificial Sequence: Synthetic oligonucleotide
  Antisense strand to SEQ ID NO: 2575074
ucugacccagagcacaguc

SEQ ID NO: 2575076 - RNA, 19 nt, Artificial Sequence
  Description of Artificial Sequence: Synthetic oligonucleotide
  Sense strand starting at position 46 of SEQ ID NO: 1889038
gggucagaggucugcgaau

SEQ ID NO: 2575077 - RNA, 19 nt, Artificial Sequence
  Description of Artificial Sequence: Synthetic oligonucleotide
  Antisense strand to SEQ ID NO: 2575076
auucgcagaccucugaccc

SEQ ID NO: 2575078 - RNA, 19 nt, Artificial Sequence
  Description of Artificial Sequence: Synthetic oligonucleotide
  Sense strand starting at position 48 of SEQ ID NO: 1889038
gucagaggucugcgaauuu

SEQ ID NO: 2575079 - RNA, 19 nt, Artificial Sequence
  Description of Artificial Sequence: Synthetic oligonucleotide
  Antisense strand to SEQ ID NO: 2575078
aaauucgcagaccucugac

SEQ ID NO: 2575080 - RNA, 19 nt, Artificial Sequence
  Description of Artificial Sequence: Synthetic oligonucleotide
  Sense strand starting at position 399 of SEQ ID NO: 1889038
guaggcucuguggguuaua

SEQ ID NO: 2575081 - RNA, 19 nt, Artificial Sequence
  Description of Artificial Sequence: Synthetic oligonucleotide
  Antisense strand to SEQ ID NO: 2575080
uauaacccacagagccuac

SEQ ID NO: 2575082 - RNA, 19 nt, Artificial Sequence
  Description of Artificial Sequence: Synthetic oligonucleotide
  Sense strand starting at position 400 of SEQ ID NO: 1889038
uaggcucuguggguuauaa

SEQ ID NO: 2575083 - RNA, 19 nt, Artificial Sequence
  Description of Artificial Sequence: Synthetic oligonucleotide
  Antisense strand to SEQ ID NO: 2575082
uuauaacccacagagccua

SEQ ID NO: 2575084 - RNA, 19 nt, Artificial Sequence
  Description of Artificial Sequence: Synthetic oligonucleotide
  Sense strand starting at position 831 of SEQ ID NO: 1889038
agcuguggcaaccgaauaa

SEQ ID NO: 2575085 - RNA, 19 nt, Artificial Sequence
  Description of Artificial Sequence: Synthetic oligonucleotide
  Antisense strand to SEQ ID NO: 2575084
uuauucgguugccacagcu

SEQ ID NO: 2575086 - RNA, 19 nt, Artificial Sequence
  Description of Artificial Sequence: Synthetic oligonucleotide
  Sense strand starting at position 843 of SEQ ID NO: 1889038
cgaauaagacccugucuca

SEQ ID NO: 2575087 - RNA, 19 nt, Artificial Sequence
  Description of Artificial Sequence: Synthetic oligonucleotide
  Antisense strand to SEQ ID NO: 2575086
ugagacagggucuuauucg

SEQ ID NO: 2575088 - RNA, 19 nt, Artificial Sequence
  Description of Artificial Sequence: Synthetic oligonucleotide
  Sense strand starting at position 1211 of SEQ ID NO: 1889038
uucccaaugucacgaaaca

SEQ ID NO: 2575089 - RNA, 19 nt, Artificial Sequence
  Description of Artificial Sequence: Synthetic oligonucleotide
  Antisense strand to SEQ ID NO: 2575088
uguuucgugacauugggaa

SEQ ID NO: 2575090 - RNA, 19 nt, Artificial Sequence
  Description of Artificial Sequence: Synthetic oligonucleotide
  Sense strand starting at position 1987 of SEQ ID NO: 1889038
ccgggcuucuaacagaacu

SEQ ID NO: 2575091 - RNA, 19 nt, Artificial Sequence
  Description of Artificial Sequence: Synthetic oligonucleotide
  Antisense strand to SEQ ID NO: 2575090
aguucuguuagaagcccgg

SEQ ID NO: 2575092 - RNA, 19 nt, Artificial Sequence
  Description of Artificial Sequence: Synthetic oligonucleotide
  Sense strand starting at position 2152 of SEQ ID NO: 1889038
gugaaauaauacuaaugga

SEQ ID NO: 2575093 - RNA, 19 nt, Artificial Sequence
  Description of Artificial Sequence: Synthetic oligonucleotide
  Antisense strand to SEQ ID NO: 2575092
uccauuaguauuauuucac

SEQ ID NO: 2575094 - RNA, 19 nt, Artificial Sequence
  Description of Artificial Sequence: Synthetic oligonucleotide
  Sense strand starting at position 2702 of SEQ ID NO: 1889038
acuagugacuucugacaua

SEQ ID NO: 2575095 - RNA, 19 nt, Artificial Sequence
  Description of Artificial Sequence: Synthetic oligonucleotide
  Antisense strand to SEQ ID NO: 2575094
uaugucagaagucacuagu

SEQ ID NO: 2575096 - RNA, 19 nt, Artificial Sequence
  Description of Artificial Sequence: Synthetic oligonucleotide
  Sense strand starting at position 2781 of SEQ ID NO: 1889038
cucaacucauuguaugaga

SEQ ID NO: 2575097 - RNA, 19 nt, Artificial Sequence
  Description of Artificial Sequence: Synthetic oligonucleotide
  Antisense strand to SEQ ID NO: 2575096
ucucauacaaugaguugag

SEQ ID NO: 2575098 - RNA, 19 nt, Artificial Sequence
  Description of Artificial Sequence: Synthetic oligonucleotide
  Sense strand starting at position 2941 of SEQ ID NO: 1889038
aggguaauuuaucaugacu

SEQ ID NO: 2575099 - RNA, 19 nt, Artificial Sequence
  Description of Artificial Sequence: Synthetic oligonucleotide
  Antisense strand to SEQ ID NO: 2575098
agucaugauaaauuacccu

SEQ ID NO: 2575100 - RNA, 19 nt, Artificial Sequence
  Description of Artificial Sequence: Synthetic oligonucleotide
  Sense strand starting at position 2943 of SEQ ID NO: 1889038
gguaauuuaucaugacugu

SEQ ID NO: 2575101 - RNA, 19 nt, Artificial Sequence
  Description of Artificial Sequence: Synthetic oligonucleotide
  Antisense strand to SEQ ID NO: 2575100
acagucaugauaaauuacc

SEQ ID NO: 2575102 - RNA, 19 nt, Artificial Sequence
  Description of Artificial Sequence: Synthetic oligonucleotide
  Sense strand starting at position 2949 of SEQ ID NO: 1889038
uuaucaugacugugcuaag

SEQ ID NO: 2575103 - RNA, 19 nt, Artificial Sequence
  Description of Artificial Sequence: Synthetic oligonucleotide
  Antisense strand to SEQ ID NO: 2575102
cuuagcacagucaugauaa

SEQ ID NO: 2575104 - RNA, 19 nt, Artificial Sequence
  Description of Artificial Sequence: Synthetic oligonucleotide
  Sense strand starting at position 2950 of SEQ ID NO: 1889038
uaucaugacugugcuaagu

SEQ ID NO: 2575105 - RNA, 19 nt, Artificial Sequence
  Description of Artificial Sequence: Synthetic oligonucleotide
  Antisense strand to SEQ ID NO: 2575104
acuuagcacagucaugaua

SEQ ID NO: 2575106 - RNA, 19 nt, Artificial Sequence
  Description of Artificial Sequence: Synthetic oligonucleotide
  Sense strand starting at position 3017 of SEQ ID NO: 1889038
aggacugacucaggauaua

SEQ ID NO: 2575107 - RNA, 19 nt, Artificial Sequence
  Description of Artificial Sequence: Synthetic oligonucleotide
  Antisense strand to SEQ ID NO: 2575106
uauauccugagucaguccu

SEQ ID NO: 2575108 - RNA, 19 nt, Artificial Sequence
  Description of Artificial Sequence: Synthetic oligonucleotide
  Sense strand starting at position 3026 of SEQ ID NO: 1889038
ucaggauauagacguugua

SEQ ID NO: 2575109 - RNA, 19 nt, Artificial Sequence
  Description of Artificial Sequence: Synthetic oligonucleotide
  Antisense strand to SEQ ID NO: 2575108
uacaacgucuauauccuga

SEQ ID NO: 2575110 - RNA, 19 nt, Artificial Sequence
  Description of Artificial Sequence: Synthetic oligonucleotide
  Sense strand starting at position 3029 of SEQ ID NO: 1889038
ggauauagacguuguauuc

SEQ ID NO: 2575111 - RNA, 19 nt, Artificial Sequence
  Description of Artificial Sequence: Synthetic oligonucleotide
  Antisense strand to SEQ ID NO: 2575110
gaauacaacgucuauaucc

SEQ ID NO: 2575112 - RNA, 19 nt, Artificial Sequence
  Description of Artificial Sequence: Synthetic oligonucleotide
  Sense strand starting at position 3119 of SEQ ID NO: 1889038
ggaauaaguuuccaagucu

SEQ ID NO: 2575113 - RNA, 19 nt, Artificial Sequence
  Description of Artificial Sequence: Synthetic oligonucleotide
  Antisense strand to SEQ ID NO: 2575112
agacuuggaaacuuauucc

SEQ ID NO: 2575114 - RNA, 19 nt, Artificial Sequence
  Description of Artificial Sequence: Synthetic oligonucleotide
  Sense strand starting at position 3131 of SEQ ID NO: 1889038
caagucuucuccugggaga

SEQ ID NO: 2575115 - RNA, 19 nt, Artificial Sequence
  Description of Artificial Sequence: Synthetic oligonucleotide
  Antisense strand to SEQ ID NO: 2575114
ucucccaggagaagacuug

SEQ ID NO: 2575116 - RNA, 19 nt, Artificial Sequence
  Description of Artificial Sequence: Synthetic oligonucleotide
  Sense strand starting at position 3132 of SEQ ID NO: 1889038
aagucuucuccugggagag

SEQ ID NO: 2575117 - RNA, 19 nt, Artificial Sequence
  Description of Artificial Sequence: Synthetic oligonucleotide
  Antisense strand to SEQ ID NO: 2575116
cucucccaggagaagacuu

SEQ ID NO: 2575118 - RNA, 19 nt, Artificial Sequence
  Description of Artificial Sequence: Synthetic oligonucleotide
  Sense strand starting at position 3133 of SEQ ID NO: 1889038
agucuucuccugggagagu

SEQ ID NO: 2575119 - RNA, 19 nt, Artificial Sequence
  Description of Artificial Sequence: Synthetic oligonucleotide
  Antisense strand to SEQ ID NO: 2575118
acucucccaggagaagacu

SEQ ID NO: 2575120 - RNA, 19 nt, Artificial Sequence
  Description of Artificial Sequence: Synthetic oligonucleotide
  Sense strand starting at position 3227 of SEQ ID NO: 1889038
uuuaaagacucaguguuua

SEQ ID NO: 2575121 - RNA, 19 nt, Artificial Sequence
  Description of Artificial Sequence: Synthetic oligonucleotide
  Antisense strand to SEQ ID NO: 2575120
uaaacacugagucuuuaaa

SEQ ID NO: 2575122 - RNA, 19 nt, Artificial Sequence
  Description of Artificial Sequence: Synthetic oligonucleotide
  Sense strand starting at position 3232 of SEQ ID NO: 1889038
agacucaguguuuauuaga

SEQ ID NO: 2575123 - RNA, 19 nt, Artificial Sequence
  Description of Artificial Sequence: Synthetic oligonucleotide
  Antisense strand to SEQ ID NO: 2575122
ucuaauaaacacugagucu

SEQ ID NO: 2575124 - RNA, 19 nt, Artificial Sequence
  Description of Artificial Sequence: Synthetic oligonucleotide
  Sense strand starting at position 3235 of SEQ ID NO: 1889038
cucaguguuuauuagaggu

SEQ ID NO: 2575125 - RNA, 19 nt, Artificial Sequence
  Description of Artificial Sequence: Synthetic oligonucleotide
  Antisense strand to SEQ ID NO: 2575124
accucuaauaaacacugag

SEQ ID NO: 2575126 - RNA, 19 nt, Artificial Sequence
  Description of Artificial Sequence: Synthetic oligonucleotide
  Sense strand starting at position 3239 of SEQ ID NO: 1889038
guguuuauuagagguugau

SEQ ID NO: 2575127 - RNA, 19 nt, Artificial Sequence
  Description of Artificial Sequence: Synthetic oligonucleotide
  Antisense strand to SEQ ID NO: 2575126
aucaaccucuaauaaacac

SEQ ID NO: 2575128 - RNA, 19 nt, Artificial Sequence
  Description of Artificial Sequence: Synthetic oligonucleotide
  Sense strand starting at position 3249 of SEQ ID NO: 1889038
gagguugauuaugugguga

SEQ ID NO: 2575129 - RNA, 19 nt, Artificial Sequence
  Description of Artificial Sequence: Synthetic oligonucleotide
  Antisense strand to SEQ ID NO: 2575128
ucaccacauaaucaaccuc

SEQ ID NO: 2575130 - RNA, 19 nt, Artificial Sequence
  Description of Artificial Sequence: Synthetic oligonucleotide
  Sense strand starting at position 3313 of SEQ ID NO: 1889038
guagguguucaguauaaac

SEQ ID NO: 2575131 - RNA, 19 nt, Artificial Sequence
  Description of Artificial Sequence: Synthetic oligonucleotide
  Antisense strand to SEQ ID NO: 2575130
guuuauacugaacaccuac

SEQ ID NO: 2575132 - RNA, 19 nt, Artificial Sequence
  Description of Artificial Sequence: Synthetic oligonucleotide
  Sense strand starting at position 3585 of SEQ ID NO: 1889038
agaacaucugauuguuuga

SEQ ID NO: 2575133 - RNA, 19 nt, Artificial Sequence
  Description of Artificial Sequence: Synthetic oligonucleotide
  Antisense strand to SEQ ID NO: 2575132
ucaaacaaucagauguucu

SEQ ID NO: 2575134 - RNA, 19 nt, Artificial Sequence
  Description of Artificial Sequence: Synthetic oligonucleotide
  Sense strand starting at position 3588 of SEQ ID NO: 1889038
acaucugauuguuugaaua

SEQ ID NO: 2575135 - RNA, 19 nt, Artificial Sequence
  Description of Artificial Sequence: Synthetic oligonucleotide
  Antisense strand to SEQ ID NO: 2575134
uauucaaacaaucagaugu

SEQ ID NO: 2575136 - RNA, 19 nt, Artificial Sequence
  Description of Artificial Sequence: Synthetic oligonucleotide
  Sense strand starting at position 3590 of SEQ ID NO: 1889038
aucugauuguuugaauaga

SEQ ID NO: 2575137 - RNA, 19 nt, Artificial Sequence
  Description of Artificial Sequence: Synthetic oligonucleotide
  Antisense strand to SEQ ID NO: 2575136
ucuauucaaacaaucagau

SEQ ID NO: 2575138 - RNA, 19 nt, Artificial Sequence
  Description of Artificial Sequence: Synthetic oligonucleotide
  Sense strand starting at position 3699 of SEQ ID NO: 1889038
acuuauggcuaguaucaua

SEQ ID NO: 2575139 - RNA, 19 nt, Artificial Sequence
  Description of Artificial Sequence: Synthetic oligonucleotide
  Antisense strand to SEQ ID NO: 2575138
uaugauacuagccauaagu

SEQ ID NO: 2575140 - RNA, 19 nt, Artificial Sequence
  Description of Artificial Sequence: Synthetic oligonucleotide
  Sense strand starting at position 3704 of SEQ ID NO: 1889038
uggcuaguaucauacuuau

SEQ ID NO: 2575141 - RNA, 19 nt, Artificial Sequence
  Description of Artificial Sequence: Synthetic oligonucleotide
  Antisense strand to SEQ ID NO: 2575140
auaaguaugauacuagcca

SEQ ID NO: 2575142 - RNA, 19 nt, Artificial Sequence
  Description of Artificial Sequence: Synthetic oligonucleotide
  Sense strand starting at position 3707 of SEQ ID NO: 1889038
cuaguaucauacuuauugu

SEQ ID NO: 2575143 - RNA, 19 nt, Artificial Sequence
  Description of Artificial Sequence: Synthetic oligonucleotide
  Antisense strand to SEQ ID NO: 2575142
acaauaaguaugauacuag

SEQ ID NO: 2575144 - RNA, 19 nt, Artificial Sequence
  Description of Artificial Sequence: Synthetic oligonucleotide
  Sense strand starting at position 3710 of SEQ ID NO: 1889038
guaucauacuuauugugaa

SEQ ID NO: 2575145 - RNA, 19 nt, Artificial Sequence
  Description of Artificial Sequence: Synthetic oligonucleotide
  Antisense strand to SEQ ID NO: 2575144
uucacaauaaguaugauac

SEQ ID NO: 2575146 - RNA, 19 nt, Artificial Sequence
  Description of Artificial Sequence: Synthetic oligonucleotide
  Sense strand starting at position 3730 of SEQ ID NO: 1889038
uuguaaacaguuugcauaa

SEQ ID NO: 2575147 - RNA, 19 nt, Artificial Sequence
  Description of Artificial Sequence: Synthetic oligonucleotide
  Antisense strand to SEQ ID NO: 2575146
uuaugcaaacuguuuacaa

SEQ ID NO: 2575148 - RNA, 19 nt, Artificial Sequence
  Description of Artificial Sequence: Synthetic oligonucleotide
  Sense strand starting at position 3732 of SEQ ID NO: 1889038
guaaacaguuugcauaaga

SEQ ID NO: 2575149 - RNA, 19 nt, Artificial Sequence
  Description of Artificial Sequence: Synthetic oligonucleotide
  Antisense strand to SEQ ID NO: 2575148
ucuuaugcaaacuguuuac

SEQ ID NO: 2575150 - RNA, 19 nt, Artificial Sequence
  Description of Artificial Sequence: Synthetic oligonucleotide
  Sense strand starting at position 3743 of SEQ ID NO: 1889038
gcauaagacuuccaaagag

SEQ ID NO: 2575151 - RNA, 19 nt, Artificial Sequence
  Description of Artificial Sequence: Synthetic oligonucleotide
  Antisense strand to SEQ ID NO: 2575150
cucuuuggaagucuuaugc

SEQ ID NO: 2575152 - RNA, 19 nt, Artificial Sequence
  Description of Artificial Sequence: Synthetic oligonucleotide
  Sense strand starting at position 3849 of SEQ ID NO: 1889038
acuuuauuagcagacgaca

SEQ ID NO: 2575153 - RNA, 19 nt, Artificial Sequence
  Description of Artificial Sequence: Synthetic oligonucleotide
  Antisense strand to SEQ ID NO: 2575152
ugucgucugcuaauaaagu

SEQ ID NO: 2575154 - RNA, 19 nt, Artificial Sequence
  Description of Artificial Sequence: Synthetic oligonucleotide
  Sense strand starting at position 6 of SEQ ID NO: 1889039
gccuaugguuagguacuaa

SEQ ID NO: 2575155 - RNA, 19 nt, Artificial Sequence
  Description of Artificial Sequence: Synthetic oligonucleotide
  Antisense strand to SEQ ID NO: 2575154
uuaguaccuaaccauaggc

SEQ ID NO: 2575156 - RNA, 19 nt, Artificial Sequence
  Description of Artificial Sequence: Synthetic oligonucleotide
  Sense strand starting at position 56 of SEQ ID NO: 1889039
acaguugagcaauagguga

SEQ ID NO: 2575157 - RNA, 19 nt, Artificial Sequence
  Description of Artificial Sequence: Synthetic oligonucleotide
  Antisense strand to SEQ ID NO: 2575156
ucaccuauugcucaacugu

SEQ ID NO: 2575158 - RNA, 19 nt, Artificial Sequence
  Description of Artificial Sequence: Synthetic oligonucleotide
  Sense strand starting at position 58 of SEQ ID NO: 1889039
aguugagcaauaggugaaa

SEQ ID NO: 2575159 - RNA, 19 nt, Artificial Sequence
  Description of Artificial Sequence: Synthetic oligonucleotide
  Antisense strand to SEQ ID NO: 2575158
uuucaccuauugcucaacu

SEQ ID NO: 2575160 - RNA, 19 nt, Artificial Sequence
  Description of Artificial Sequence: Synthetic oligonucleotide
  Sense strand starting at position 60 of SEQ ID NO: 1889039
uugagcaauaggugaaaga

SEQ ID NO: 2575161 - RNA, 19 nt, Artificial Sequence
  Description of Artificial Sequence: Synthetic oligonucleotide
  Antisense strand to SEQ ID NO: 2575160
ucuuucaccuauugcucaa

SEQ ID NO: 2575162 - RNA, 19 nt, Artificial Sequence
  Description of Artificial Sequence: Synthetic oligonucleotide
  Sense strand starting at position 235 of SEQ ID NO: 1889039
gccagucacaugggauauc

SEQ ID NO: 2575163 - RNA, 19 nt, Artificial Sequence
  Description of Artificial Sequence: Synthetic oligonucleotide
  Antisense strand to SEQ ID NO: 2575162
gauaucccaugugacuggc

SEQ ID NO: 2575164 - RNA, 19 nt, Artificial Sequence
  Description of Artificial Sequence: Synthetic oligonucleotide
  Sense strand starting at position 245 of SEQ ID NO: 1889039
ugggauaucucagcaagcu

SEQ ID NO: 2575165 - RNA, 19 nt, Artificial Sequence
  Description of Artificial Sequence: Synthetic oligonucleotide
  Antisense strand to SEQ ID NO: 2575164
agcuugcugagauauccca

SEQ ID NO: 2575166 - RNA, 19 nt, Artificial Sequence
  Description of Artificial Sequence: Synthetic oligonucleotide
  Sense strand starting at position 246 of SEQ ID NO: 1889039
gggauaucucagcaagcuu

SEQ ID NO: 2575167 - RNA, 19 nt, Artificial Sequence
  Description of Artificial Sequence: Synthetic oligonucleotide
  Antisense strand to SEQ ID NO: 2575166
aagcuugcugagauauccc

SEQ ID NO: 2575168 - RNA, 19 nt, Artificial Sequence
  Description of Artificial Sequence: Synthetic oligonucleotide
  Sense strand starting at position 365 of SEQ ID NO: 1889039
ugagccaauggaugucaga

SEQ ID NO: 2575169 - RNA, 19 nt, Artificial Sequence
  Description of Artificial Sequence: Synthetic oligonucleotide
  Antisense strand to SEQ ID NO: 2575168
ucugacauccauuggcuca

SEQ ID NO: 2575170 - RNA, 19 nt, Artificial Sequence
  Description of Artificial Sequence: Synthetic oligonucleotide
  Sense strand starting at position 404 of SEQ ID NO: 1889039
aguuaaauugcggagagga

SEQ ID NO: 2575171 - RNA, 19 nt, Artificial Sequence
  Description of Artificial Sequence: Synthetic oligonucleotide
  Antisense strand to SEQ ID NO: 2575170
uccucuccgcaauuuaacu

SEQ ID NO: 2575172 - RNA, 19 nt, Artificial Sequence
  Description of Artificial Sequence: Synthetic oligonucleotide
  Sense strand starting at position 554 of SEQ ID NO: 1889039
ucaagacuuucugugucua

SEQ ID NO: 2575173 - RNA, 19 nt, Artificial Sequence
  Description of Artificial Sequence: Synthetic oligonucleotide
  Antisense strand to SEQ ID NO: 2575172
uagacacagaaagucuuga

SEQ ID NO: 2575174 - RNA, 19 nt, Artificial Sequence
  Description of Artificial Sequence: Synthetic oligonucleotide
  Sense strand starting at position 558 of SEQ ID NO: 1889039
gacuuucugugucuacaga

SEQ ID NO: 2575175 - RNA, 19 nt, Artificial Sequence
  Description of Artificial Sequence: Synthetic oligonucleotide
  Antisense strand to SEQ ID NO: 2575174
ucuguagacacagaaaguc

SEQ ID NO: 2575176 - RNA, 19 nt, Artificial Sequence
  Description of Artificial Sequence: Synthetic oligonucleotide
  Sense strand starting at position 690 of SEQ ID NO: 1889039
uugcuucuaccugaugaau

SEQ ID NO: 2575177 - RNA, 19 nt, Artificial Sequence
  Description of Artificial Sequence: Synthetic oligonucleotide
  Antisense strand to SEQ ID NO: 2575176
auucaucagguagaagcaa

SEQ ID NO: 2575178 - RNA, 19 nt, Artificial Sequence
  Description of Artificial Sequence: Synthetic oligonucleotide
  Sense strand starting at position 702 of SEQ ID NO: 1889039
gaugaaugaccaugccagu

SEQ ID NO: 2575179 - RNA, 19 nt, Artificial Sequence
  Description of Artificial Sequence: Synthetic oligonucleotide
  Antisense strand to SEQ ID NO: 2575178
acuggcauggucauucauc

SEQ ID NO: 2575180 - RNA, 19 nt, Artificial Sequence
  Description of Artificial Sequence: Synthetic oligonucleotide
  Sense strand starting at position 741 of SEQ ID NO: 1889039
uggcguauuccaccuguuu

SEQ ID NO: 2575181 - RNA, 19 nt, Artificial Sequence
  Description of Artificial Sequence: Synthetic oligonucleotide
  Antisense strand to SEQ ID NO: 2575180
aaacagguggaauacgcca

SEQ ID NO: 2575182 - RNA, 19 nt, Artificial Sequence
  Description of Artificial Sequence: Synthetic oligonucleotide
  Sense strand starting at position 794 of SEQ ID NO: 1889039
cucucugccagaggagaau

SEQ ID NO: 2575183 - RNA, 19 nt, Artificial Sequence
  Description of Artificial Sequence: Synthetic oligonucleotide
  Antisense strand to SEQ ID NO: 2575182
auucuccucuggcagagag

SEQ ID NO: 2575184 - RNA, 19 nt, Artificial Sequence
  Description of Artificial Sequence: Synthetic oligonucleotide
  Sense strand starting at position 855 of SEQ ID NO: 1889039
caucuaagagcugguacau

SEQ ID NO: 2575185 - RNA, 19 nt, Artificial Sequence
  Description of Artificial Sequence: Synthetic oligonucleotide
  Antisense strand to SEQ ID NO: 2575184
auguaccagcucuuagaug

SEQ ID NO: 2575186 - RNA, 19 nt, Artificial Sequence
  Description of Artificial Sequence: Synthetic oligonucleotide
  Sense strand starting at position 964 of SEQ ID NO: 1889039
ggaaccuuccucugucuca

SEQ ID NO: 2575187 - RNA, 19 nt, Artificial Sequence
  Description of Artificial Sequence: Synthetic oligonucleotide
  Antisense strand to SEQ ID NO: 2575186
ugagacagaggaagguucc

SEQ ID NO: 2575188 - RNA, 19 nt, Artificial Sequence
  Description of Artificial Sequence: Synthetic oligonucleotide
  Sense strand starting at position 1024 of SEQ ID NO: 1889039
guguguaucacugauucua

SEQ ID NO: 2575189 - RNA, 19 nt, Artificial Sequence
  Description of Artificial Sequence: Synthetic oligonucleotide
  Antisense strand to SEQ ID NO: 2575188
uagaaucagugauacacac

SEQ ID NO: 2575190 - RNA, 19 nt, Artificial Sequence
  Description of Artificial Sequence: Synthetic oligonucleotide
  Sense strand starting at position 1026 of SEQ ID NO: 1889039
guguaucacugauucuaga

SEQ ID NO: 2575191 - RNA, 19 nt, Artificial Sequence
  Description of Artificial Sequence: Synthetic oligonucleotide
  Antisense strand to SEQ ID NO: 2575190
ucuagaaucagugauacac

SEQ ID NO: 2575192 - RNA, 19 nt, Artificial Sequence
  Description of Artificial Sequence: Synthetic oligonucleotide
  Sense strand starting at position 1160 of SEQ ID NO: 1889039
acagguaccugauccagaa

SEQ ID NO: 2575193 - RNA, 19 nt, Artificial Sequence
  Description of Artificial Sequence: Synthetic oligonucleotide
  Antisense strand to SEQ ID NO: 2575192
uucuggaucagguaccugu

SEQ ID NO: 2575194 - RNA, 19 nt, Artificial Sequence
  Description of Artificial Sequence: Synthetic oligonucleotide
  Sense strand starting at position 1452 of SEQ ID NO: 1889039
gcauaacacggagagcuuu

SEQ ID NO: 2575195 - RNA, 19 nt, Artificial Sequence
  Description of Artificial Sequence: Synthetic oligonucleotide
  Antisense strand to SEQ ID NO: 2575194
aaagcucuccguguuaugc

SEQ ID NO: 2575196 - RNA, 19 nt, Artificial Sequence
  Description of Artificial Sequence: Synthetic oligonucleotide
  Sense strand starting at position 1610 of SEQ ID NO: 1889039
ggugaaauacgaagcguuu

SEQ ID NO: 2575197 - RNA, 19 nt, Artificial Sequence
  Description of Artificial Sequence: Synthetic oligonucleotide
  Antisense strand to SEQ ID NO: 2575196
aaacgcuucguauuucacc

SEQ ID NO: 2575198 - RNA, 19 nt, Artificial Sequence
  Description of Artificial Sequence: Synthetic oligonucleotide
  Sense strand starting at position 1806 of SEQ ID NO: 1889039
ggaugauccauaggcaaug

SEQ ID NO: 2575199 - RNA, 19 nt, Artificial Sequence
  Description of Artificial Sequence: Synthetic oligonucleotide
  Antisense strand to SEQ ID NO: 2575198
cauugccuauggaucaucc

SEQ ID NO: 2575200 - RNA, 19 nt, Artificial Sequence
  Description of Artificial Sequence: Synthetic oligonucleotide
  Sense strand starting at position 1818 of SEQ ID NO: 1889039
ggcaaugagugucucuaag

SEQ ID NO: 2575201 - RNA, 19 nt, Artificial Sequence
  Description of Artificial Sequence: Synthetic oligonucleotide
  Antisense strand to SEQ ID NO: 2575200
cuuagagacacucauugcc

SEQ ID NO: 2575202 - RNA, 19 nt, Artificial Sequence
  Description of Artificial Sequence: Synthetic oligonucleotide
  Sense strand starting at position 1820 of SEQ ID NO: 1889039
caaugagugucucuaagag

SEQ ID NO: 2575203 - RNA, 19 nt, Artificial Sequence
  Description of Artificial Sequence: Synthetic oligonucleotide
  Antisense strand to SEQ ID NO: 2575202
cucuuagagacacucauug

SEQ ID NO: 2575204 - RNA, 19 nt, Artificial Sequence
  Description of Artificial Sequence: Synthetic oligonucleotide
  Sense strand starting at position 2380 of SEQ ID NO: 1889039
ugacccaaucuacguaauu

SEQ ID NO: 2575205 - RNA, 19 nt, Artificial Sequence
  Description of Artificial Sequence: Synthetic oligonucleotide
  Antisense strand to SEQ ID NO: 2575204
aauuacguagauuggguca

SEQ ID NO: 2575206 - RNA, 19 nt, Artificial Sequence
  Description of Artificial Sequence: Synthetic oligonucleotide
  Sense strand starting at position 2551 of SEQ ID NO: 1889039
cagggcucacagugaaaua

SEQ ID NO: 2575207 - RNA, 19 nt, Artificial Sequence
  Description of Artificial Sequence: Synthetic oligonucleotide
  Antisense strand to SEQ ID NO: 2575206
uauuucacugugagcccug

SEQ ID NO: 2575208 - RNA, 19 nt, Artificial Sequence
  Description of Artificial Sequence: Synthetic oligonucleotide
  Sense strand starting at position 2602 of SEQ ID NO: 1889039
ucuuacaaagcuuggauaa

SEQ ID NO: 2575209 - RNA, 19 nt, Artificial Sequence
  Description of Artificial Sequence: Synthetic oligonucleotide
  Antisense strand to SEQ ID NO: 2575208
uuauccaagcuuuguaaga

SEQ ID NO: 2575210 - RNA, 19 nt, Artificial Sequence
  Description of Artificial Sequence: Synthetic oligonucleotide
  Sense strand starting at position 2603 of SEQ ID NO: 1889039
cuuacaaagcuuggauaau

SEQ ID NO: 2575211 - RNA, 19 nt, Artificial Sequence
  Description of Artificial Sequence: Synthetic oligonucleotide
  Antisense strand to SEQ ID NO: 2575210
auuauccaagcuuuguaag

SEQ ID NO: 2575212 - RNA, 19 nt, Artificial Sequence
  Description of Artificial Sequence: Synthetic oligonucleotide
  Sense strand starting at position 2770 of SEQ ID NO: 1889039
ucagacguuuaauuguuaa

SEQ ID NO: 2575213 - RNA, 19 nt, Artificial Sequence
  Description of Artificial Sequence: Synthetic oligonucleotide
  Antisense strand to SEQ ID NO: 2575212
uuaacaauuaaacgucuga

SEQ ID NO: 2575214 - RNA, 19 nt, Artificial Sequence
  Description of Artificial Sequence: Synthetic oligonucleotide
  Sense strand starting at position 2880 of SEQ ID NO: 1889039
acaggaauuugugagauca

SEQ ID NO: 2575215 - RNA, 19 nt, Artificial Sequence
  Description of Artificial Sequence: Synthetic oligonucleotide
  Antisense strand to SEQ ID NO: 2575214
ugaucucacaaauuccugu

SEQ ID NO: 2575216 - RNA, 19 nt, Artificial Sequence
  Description of Artificial Sequence: Synthetic oligonucleotide
  Sense strand starting at position 2882 of SEQ ID NO: 1889039
aggaauuugugagaucaua

SEQ ID NO: 2575217 - RNA, 19 nt, Artificial Sequence
  Description of Artificial Sequence: Synthetic oligonucleotide
  Antisense strand to SEQ ID NO: 2575216
uaugaucucacaaauuccu

SEQ ID NO: 2575218 - RNA, 19 nt, Artificial Sequence
  Description of Artificial Sequence: Synthetic oligonucleotide
  Sense strand starting at position 3103 of SEQ ID NO: 1889039
aaaugaauuguuuguagca

SEQ ID NO: 2575219 - RNA, 19 nt, Artificial Sequence
  Description of Artificial Sequence: Synthetic oligonucleotide
  Antisense strand to SEQ ID NO: 2575218
ugcuacaaacaauucauuu

SEQ ID NO: 2575220 - RNA, 19 nt, Artificial Sequence
  Description of Artificial Sequence: Synthetic oligonucleotide
  Sense strand starting at position 3394 of SEQ ID NO: 1889039
uuauguauggugugaugaa

SEQ ID NO: 2575221 - RNA, 19 nt, Artificial Sequence
  Description of Artificial Sequence: Synthetic oligonucleotide
  Antisense strand to SEQ ID NO: 2575220
uucaucacaccauacauaa

SEQ ID NO: 2575222 - RNA, 19 nt, Artificial Sequence
  Description of Artificial Sequence: Synthetic oligonucleotide
  Sense strand starting at position 3458 of SEQ ID NO: 1889039
gcaccuucuguugaagaga

SEQ ID NO: 2575223 - RNA, 19 nt, Artificial Sequence
  Description of Artificial Sequence: Synthetic oligonucleotide
  Antisense strand to SEQ ID NO: 2575222
ucucuucaacagaaggugc

SEQ ID NO: 2575224 - RNA, 19 nt, Artificial Sequence
  Description of Artificial Sequence: Synthetic oligonucleotide
  Sense strand starting at position 3530 of SEQ ID NO: 1889039
acagauguauaggcuuaua

SEQ ID NO: 2575225 - RNA, 19 nt, Artificial Sequence
  Description of Artificial Sequence: Synthetic oligonucleotide
  Antisense strand to SEQ ID NO: 2575224
uauaagccuauacaucugu

SEQ ID NO: 2575226 - RNA, 19 nt, Artificial Sequence
  Description of Artificial Sequence: Synthetic oligonucleotide
  Sense strand starting at position 3533 of SEQ ID NO: 1889039
gauguauaggcuuauaucu

SEQ ID NO: 2575227 - RNA, 19 nt, Artificial Sequence
  Description of Artificial Sequence: Synthetic oligonucleotide
  Antisense strand to SEQ ID NO: 2575226
agauauaagccuauacauc

SEQ ID NO: 2575228 - RNA, 19 nt, Artificial Sequence
  Description of Artificial Sequence: Synthetic oligonucleotide
  Sense strand starting at position 3541 of SEQ ID NO: 1889039
ggcuuauaucuggacucuu

SEQ ID NO: 2575229 - RNA, 19 nt, Artificial Sequence
  Description of Artificial Sequence: Synthetic oligonucleotide
  Antisense strand to SEQ ID NO: 2575228
aagaguccagauauaagcc

SEQ ID NO: 2575230 - RNA, 19 nt, Artificial Sequence
  Description of Artificial Sequence: Synthetic oligonucleotide
  Sense strand starting at position 3666 of SEQ ID NO: 1889039
caguaagugugauuucucu

SEQ ID NO: 2575231 - RNA, 19 nt, Artificial Sequence
  Description of Artificial Sequence: Synthetic oligonucleotide
  Antisense strand to SEQ ID NO: 2575230
agagaaaucacacuuacug

SEQ ID NO: 2575232 - RNA, 19 nt, Artificial Sequence
  Description of Artificial Sequence: Synthetic oligonucleotide
  Sense strand starting at position 3699 of SEQ ID NO: 1889039
gauuguauuggcuacucau

SEQ ID NO: 2575233 - RNA, 19 nt, Artificial Sequence
  Description of Artificial Sequence: Synthetic oligonucleotide
  Antisense strand to SEQ ID NO: 2575232
augaguagccaauacaauc

SEQ ID NO: 2575234 - RNA, 19 nt, Artificial Sequence
  Description of Artificial Sequence: Synthetic oligonucleotide
  Sense strand starting at position 2031 of SEQ ID NO: 1889040
uuuggcaguauguagagau

SEQ ID NO: 2575235 - RNA, 19 nt, Artificial Sequence
  Description of Artificial Sequence: Synthetic oligonucleotide
  Antisense strand to SEQ ID NO: 2575234
aucucuacauacugccaaa

SEQ ID NO: 2575236 - RNA, 19 nt, Artificial Sequence
  Description of Artificial Sequence: Synthetic oligonucleotide
  Sense strand starting at position 2035 of SEQ ID NO: 1889040
gcaguauguagagauauuc

SEQ ID NO: 2575237 - RNA, 19 nt, Artificial Sequence
  Description of Artificial Sequence: Synthetic oligonucleotide
  Antisense strand to SEQ ID NO: 2575236
gaauaucucuacauacugc

SEQ ID NO: 2575238 - RNA, 19 nt, Artificial Sequence
  Description of Artificial Sequence: Synthetic oligonucleotide
  Sense strand starting at position 3537 of SEQ ID NO: 1889040
aggauuggcuagcgucuua

SEQ ID NO: 2575239 - RNA, 19 nt, Artificial Sequence
  Description of Artificial Sequence: Synthetic oligonucleotide
  Antisense strand to SEQ ID NO: 2575238
uaagacgcuagccaauccu

SEQ ID NO: 2575240 - RNA, 19 nt, Artificial Sequence
  Description of Artificial Sequence: Synthetic oligonucleotide
  Sense strand starting at position 3625 of SEQ ID NO: 1889040
ugaagagauuguuugacuc

SEQ ID NO: 2575241 - RNA, 19 nt, Artificial Sequence
  Description of Artificial Sequence: Synthetic oligonucleotide
  Antisense strand to SEQ ID NO: 2575240
gagucaaacaaucucuuca

SEQ ID NO: 2575242 - RNA, 19 nt, Artificial Sequence
  Description of Artificial Sequence: Synthetic oligonucleotide
  Sense strand starting at position 3627 of SEQ ID NO: 1889040
aagagauuguuugacucca

SEQ ID NO: 2575243 - RNA, 19 nt, Artificial Sequence
  Description of Artificial Sequence: Synthetic oligonucleotide
  Antisense strand to SEQ ID NO: 2575242
uggagucaaacaaucucuu

SEQ ID NO: 2575244 - RNA, 19 nt, Artificial Sequence
  Description of Artificial Sequence: Synthetic oligonucleotide
  Sense strand starting at position 3629 of SEQ ID NO: 1889040
gagauuguuugacuccauu

SEQ ID NO: 2575245 - RNA, 19 nt, Artificial Sequence
  Description of Artificial Sequence: Synthetic oligonucleotide
  Antisense strand to SEQ ID NO: 2575244
aauggagucaaacaaucuc

SEQ ID NO: 2575246 - RNA, 19 nt, Artificial Sequence
  Description of Artificial Sequence: Synthetic oligonucleotide
  Sense strand starting at position 3642 of SEQ ID NO: 1889040
uccauuaggugcucuuaua

SEQ ID NO: 2575247 - RNA, 19 nt, Artificial Sequence
  Description of Artificial Sequence: Synthetic oligonucleotide
  Antisense strand to SEQ ID NO: 2575246
uauaagagcaccuaaugga

SEQ ID NO: 2575248 - RNA, 19 nt, Artificial Sequence
  Description of Artificial Sequence: Synthetic oligonucleotide
  Sense strand starting at position 3750 of SEQ ID NO: 1889040
uuaacauauguagggauau

SEQ ID NO: 2575249 - RNA, 19 nt, Artificial Sequence
  Description of Artificial Sequence: Synthetic oligonucleotide
  Antisense strand to SEQ ID NO: 2575248
auaucccuacauauguuaa

SEQ ID NO: 2575250 - RNA, 19 nt, Artificial Sequence
  Description of Artificial Sequence: Synthetic oligonucleotide
  Sense strand starting at position 3751 of SEQ ID NO: 1889040
uaacauauguagggauauu

SEQ ID NO: 2575251 - RNA, 19 nt, Artificial Sequence
  Description of Artificial Sequence: Synthetic oligonucleotide
  Antisense strand to SEQ ID NO: 2575250
aauaucccuacauauguua

SEQ ID NO: 2575252 - RNA, 19 nt, Artificial Sequence
  Description of Artificial Sequence: Synthetic oligonucleotide
  Sense strand starting at position 3800 of SEQ ID NO: 1889040
gggaguguugcugcacguu

SEQ ID NO: 2575253 - RNA, 19 nt, Artificial Sequence
  Description of Artificial Sequence: Synthetic oligonucleotide
  Antisense strand to SEQ ID NO: 2575252
aacgugcagcaacacuccc

SEQ ID NO: 2575254 - RNA, 19 nt, Artificial Sequence
  Description of Artificial Sequence: Synthetic oligonucleotide
  Sense strand starting at position 3805 of SEQ ID NO: 1889040
uguugcugcacguuugaga

SEQ ID NO: 2575255 - RNA, 19 nt, Artificial Sequence
  Description of Artificial Sequence: Synthetic oligonucleotide
  Antisense strand to SEQ ID NO: 2575254
ucucaaacgugcagcaaca

SEQ ID NO: 2575256 - RNA, 19 nt, Artificial Sequence
  Description of Artificial Sequence: Synthetic oligonucleotide
  Sense strand starting at position 3920 of SEQ ID NO: 1889040
aaccuugugggccauuaua

SEQ ID NO: 2575257 - RNA, 19 nt, Artificial Sequence
  Description of Artificial Sequence: Synthetic oligonucleotide
  Antisense strand to SEQ ID NO: 2575256
uauaauggcccacaagguu

SEQ ID NO: 2575258 - RNA, 19 nt, Artificial Sequence
  Description of Artificial Sequence: Synthetic oligonucleotide
  Sense strand starting at position 3928 of SEQ ID NO: 1889040
gggccauuauaagaacuuu

SEQ ID NO: 2575259 - RNA, 19 nt, Artificial Sequence
  Description of Artificial Sequence: Synthetic oligonucleotide
  Antisense strand to SEQ ID NO: 2575258
aaaguucuuauaauggccc

SEQ ID NO: 2575260 - RNA, 19 nt, Artificial Sequence
  Description of Artificial Sequence: Synthetic oligonucleotide
  Sense strand starting at position 3955 of SEQ ID NO: 1889040
cccugauuaaaguguggua

SEQ ID NO: 2575261 - RNA, 19 nt, Artificial Sequence
  Description of Artificial Sequence: Synthetic oligonucleotide
  Antisense strand to SEQ ID NO: 2575260
uaccacacuuuaaucaggg

SEQ ID NO: 2575262 - RNA, 19 nt, Artificial Sequence
  Description of Artificial Sequence: Synthetic oligonucleotide
  Sense strand starting at position 3958 of SEQ ID NO: 1889040
ugauuaaagugugguacca

SEQ ID NO: 2575263 - RNA, 19 nt, Artificial Sequence
  Description of Artificial Sequence: Synthetic oligonucleotide
  Antisense strand to SEQ ID NO: 2575262
ugguaccacacuuuaauca

SEQ ID NO: 2575264 - RNA, 19 nt, Artificial Sequence
  Description of Artificial Sequence: Synthetic oligonucleotide
  Sense strand starting at position 3960 of SEQ ID NO: 1889040
auuaaagugugguaccauu

SEQ ID NO: 2575265 - RNA, 19 nt, Artificial Sequence
  Description of Artificial Sequence: Synthetic oligonucleotide
  Antisense strand to SEQ ID NO: 2575264
aaugguaccacacuuuaau

SEQ ID NO: 2575266 - RNA, 19 nt, Artificial Sequence
  Description of Artificial Sequence: Synthetic oligonucleotide
  Sense strand starting at position 3968 of SEQ ID NO: 1889040
gugguaccauuguagaguu

SEQ ID NO: 2575267 - RNA, 19 nt, Artificial Sequence
  Description of Artificial Sequence: Synthetic oligonucleotide
  Antisense strand to SEQ ID NO: 2575266
aacucuacaaugguaccac

SEQ ID NO: 2575268 - RNA, 19 nt, Artificial Sequence
  Description of Artificial Sequence: Synthetic oligonucleotide
  Sense strand starting at position 29 of SEQ ID NO: 1889041
gggagagaugccuggguaa

SEQ ID NO: 2575269 - RNA, 19 nt, Artificial Sequence
  Description of Artificial Sequence: Synthetic oligonucleotide
  Antisense strand to SEQ ID NO: 2575268
uuacccaggcaucucuccc

SEQ ID NO: 2575270 - RNA, 19 nt, Artificial Sequence
  Description of Artificial Sequence: Synthetic oligonucleotide
  Sense strand starting at position 31 of SEQ ID NO: 1889041
gagagaugccuggguaagg

SEQ ID NO: 2575271 - RNA, 19 nt, Artificial Sequence
  Description of Artificial Sequence: Synthetic oligonucleotide
  Antisense strand to SEQ ID NO: 2575270
ccuuacccaggcaucucuc

SEQ ID NO: 2575272 - RNA, 19 nt, Artificial Sequence
  Description of Artificial Sequence: Synthetic oligonucleotide
  Sense strand starting at position 164 of SEQ ID NO: 1889041
auccaagugcucggucaca

SEQ ID NO: 2575273 - RNA, 19 nt, Artificial Sequence
  Description of Artificial Sequence: Synthetic oligonucleotide
  Antisense strand to SEQ ID NO: 2575272
ugugaccgagcacuuggau

SEQ ID NO: 2575274 - RNA, 19 nt, Artificial Sequence
  Description of Artificial Sequence: Synthetic oligonucleotide
  Sense strand starting at position 201 of SEQ ID NO: 1889041
gcgggauggcugugaagga

SEQ ID NO: 2575275 - RNA, 19 nt, Artificial Sequence
  Description of Artificial Sequence: Synthetic oligonucleotide
  Antisense strand to SEQ ID NO: 2575274
uccuucacagccaucccgc

SEQ ID NO: 2575276 - RNA, 19 nt, Artificial Sequence
  Description of Artificial Sequence: Synthetic oligonucleotide
  Sense strand starting at position 202 of SEQ ID NO: 1889041
cgggauggcugugaaggaa

SEQ ID NO: 2575277 - RNA, 19 nt, Artificial Sequence
  Description of Artificial Sequence: Synthetic oligonucleotide
  Antisense strand to SEQ ID NO: 2575276
uuccuucacagccaucccg

SEQ ID NO: 2575278 - RNA, 19 nt, Artificial Sequence
  Description of Artificial Sequence: Synthetic oligonucleotide
  Sense strand starting at position 381 of SEQ ID NO: 1889041
ggacgaguuacugaaggca

SEQ ID NO: 2575279 - RNA, 19 nt, Artificial Sequence
  Description of Artificial Sequence: Synthetic oligonucleotide
  Antisense strand to SEQ ID NO: 2575278
ugccuucaguaacucgucc

SEQ ID NO: 2575280 - RNA, 19 nt, Artificial Sequence
  Description of Artificial Sequence: Synthetic oligonucleotide
  Sense strand starting at position 394 of SEQ ID NO: 1889041
aaggcauccucagcagaga

SEQ ID NO: 2575281 - RNA, 19 nt, Artificial Sequence
  Description of Artificial Sequence: Synthetic oligonucleotide
  Antisense strand to SEQ ID NO: 2575280
ucucugcugaggaugccuu

SEQ ID NO: 2575282 - RNA, 19 nt, Artificial Sequence
  Description of Artificial Sequence: Synthetic oligonucleotide
  Sense strand starting at position 397 of SEQ ID NO: 1889041
gcauccucagcagagacau

SEQ ID NO: 2575283 - RNA, 19 nt, Artificial Sequence
  Description of Artificial Sequence: Synthetic oligonucleotide
  Antisense strand to SEQ ID NO: 2575282
augucucugcugaggaugc

SEQ ID NO: 2575284 - RNA, 19 nt, Artificial Sequence
  Description of Artificial Sequence: Synthetic oligonucleotide
  Sense strand starting at position 516 of SEQ ID NO: 1889041
gcguuuccugaagaaguaa

SEQ ID NO: 2575285 - RNA, 19 nt, Artificial Sequence
  Description of Artificial Sequence: Synthetic oligonucleotide
  Antisense strand to SEQ ID NO: 2575284
uuacuucuucaggaaacgc

SEQ ID NO: 2575286 - RNA, 19 nt, Artificial Sequence
  Description of Artificial Sequence: Synthetic oligonucleotide
  Sense strand starting at position 539 of SEQ ID NO: 1889041
gagagacucugguuccaga

SEQ ID NO: 2575287 - RNA, 19 nt, Artificial Sequence
  Description of Artificial Sequence: Synthetic oligonucleotide
  Antisense strand to SEQ ID NO: 2575286
ucuggaaccagagucucuc

SEQ ID NO: 2575288 - RNA, 19 nt, Artificial Sequence
  Description of Artificial Sequence: Synthetic oligonucleotide
  Sense strand starting at position 564 of SEQ ID NO: 1889041
acuuguuagcugugagaga

SEQ ID NO: 2575289 - RNA, 19 nt, Artificial Sequence
  Description of Artificial Sequence: Synthetic oligonucleotide
  Antisense strand to SEQ ID NO: 2575288
ucucucacagcuaacaagu

SEQ ID NO: 2575290 - RNA, 19 nt, Artificial Sequence
  Description of Artificial Sequence: Synthetic oligonucleotide
  Sense strand starting at position 836 of SEQ ID NO: 1889041
uucuguguccugccuaagu

SEQ ID NO: 2575291 - RNA, 19 nt, Artificial Sequence
  Description of Artificial Sequence: Synthetic oligonucleotide
  Antisense strand to SEQ ID NO: 2575290
acuuaggcaggacacagaa

SEQ ID NO: 2575292 - RNA, 19 nt, Artificial Sequence
  Description of Artificial Sequence: Synthetic oligonucleotide
  Sense strand starting at position 904 of SEQ ID NO: 1889041
aggcuuguccucuggauac

SEQ ID NO: 2575293 - RNA, 19 nt, Artificial Sequence
  Description of Artificial Sequence: Synthetic oligonucleotide
  Antisense strand to SEQ ID NO: 2575292
guauccagaggacaagccu

SEQ ID NO: 2575294 - RNA, 19 nt, Artificial Sequence
  Description of Artificial Sequence: Synthetic oligonucleotide
  Sense strand starting at position 906 of SEQ ID NO: 1889041
gcuuguccucuggauacgu

SEQ ID NO: 2575295 - RNA, 19 nt, Artificial Sequence
  Description of Artificial Sequence: Synthetic oligonucleotide
  Antisense strand to SEQ ID NO: 2575294
acguauccagaggacaagc

SEQ ID NO: 2575296 - RNA, 19 nt, Artificial Sequence
  Description of Artificial Sequence: Synthetic oligonucleotide
  Sense strand starting at position 915 of SEQ ID NO: 1889041
cuggauacgucccugacua

SEQ ID NO: 2575297 - RNA, 19 nt, Artificial Sequence
  Description of Artificial Sequence: Synthetic oligonucleotide
  Antisense strand to SEQ ID NO: 2575296
uagucagggacguauccag

SEQ ID NO: 2575298 - RNA, 19 nt, Artificial Sequence
  Description of Artificial Sequence: Synthetic oligonucleotide
  Sense strand starting at position 916 of SEQ ID NO: 1889041
uggauacgucccugacuau

SEQ ID NO: 2575299 - RNA, 19 nt, Artificial Sequence
  Description of Artificial Sequence: Synthetic oligonucleotide
  Antisense strand to SEQ ID NO: 2575298
auagucagggacguaucca

SEQ ID NO: 2575300 - RNA, 19 nt, Artificial Sequence
  Description of Artificial Sequence: Synthetic oligonucleotide
  Sense strand starting at position 917 of SEQ ID NO: 1889041
ggauacgucccugacuaua

SEQ ID NO: 2575301 - RNA, 19 nt, Artificial Sequence
  Description of Artificial Sequence: Synthetic oligonucleotide
  Antisense strand to SEQ ID NO: 2575300
uauagucagggacguaucc

SEQ ID NO: 2575302 - RNA, 19 nt, Artificial Sequence
  Description of Artificial Sequence: Synthetic oligonucleotide
  Sense strand starting at position 919 of SEQ ID NO: 1889041
auacgucccugacuauagu

SEQ ID NO: 2575303 - RNA, 19 nt, Artificial Sequence
  Description of Artificial Sequence: Synthetic oligonucleotide
  Antisense strand to SEQ ID NO: 2575302
acuauagucagggacguau

SEQ ID NO: 2575304 - RNA, 19 nt, Artificial Sequence
  Description of Artificial Sequence: Synthetic oligonucleotide
  Sense strand starting at position 2462 of SEQ ID NO: 1889041
gcugucaccuccuuagugu

SEQ ID NO: 2575305 - RNA, 19 nt, Artificial Sequence
  Description of Artificial Sequence: Synthetic oligonucleotide
  Antisense strand to SEQ ID NO: 2575304
acacuaaggaggugacagc

SEQ ID NO: 2575306 - RNA, 19 nt, Artificial Sequence
  Description of Artificial Sequence: Synthetic oligonucleotide
  Sense strand starting at position 2469 of SEQ ID NO: 1889041
ccuccuuaguguccuugaa

SEQ ID NO: 2575307 - RNA, 19 nt, Artificial Sequence
  Description of Artificial Sequence: Synthetic oligonucleotide
  Antisense strand to SEQ ID NO: 2575306
uucaaggacacuaaggagg

SEQ ID NO: 2575308 - RNA, 19 nt, Artificial Sequence
  Description of Artificial Sequence: Synthetic oligonucleotide
  Sense strand starting at position 2473 of SEQ ID NO: 1889041
cuuaguguccuugaaggag

SEQ ID NO: 2575309 - RNA, 19 nt, Artificial Sequence
  Description of Artificial Sequence: Synthetic oligonucleotide
  Antisense strand to SEQ ID NO: 2575308
cuccuucaaggacacuaag

SEQ ID NO: 2575310 - RNA, 19 nt, Artificial Sequence
  Description of Artificial Sequence: Synthetic oligonucleotide
  Sense strand starting at position 2499 of SEQ ID NO: 1889041
gaggcagucacucacguau

SEQ ID NO: 2575311 - RNA, 19 nt, Artificial Sequence
  Description of Artificial Sequence: Synthetic oligonucleotide
  Antisense strand to SEQ ID NO: 2575310
auacgugagugacugccuc

SEQ ID NO: 2575312 - RNA, 19 nt, Artificial Sequence
  Description of Artificial Sequence: Synthetic oligonucleotide
  Sense strand starting at position 2605 of SEQ ID NO: 1889041
caccuaucccgguggcaaa

SEQ ID NO: 2575313 - RNA, 19 nt, Artificial Sequence
  Description of Artificial Sequence: Synthetic oligonucleotide
  Antisense strand to SEQ ID NO: 2575312
uuugccaccgggauaggug

SEQ ID NO: 2575314 - RNA, 19 nt, Artificial Sequence
  Description of Artificial Sequence: Synthetic oligonucleotide
  Sense strand starting at position 2767 of SEQ ID NO: 1889041
ugcguauucagguccgagu

SEQ ID NO: 2575315 - RNA, 19 nt, Artificial Sequence
  Description of Artificial Sequence: Synthetic oligonucleotide
  Antisense strand to SEQ ID NO: 2575314
acucggaccugaauacgca

SEQ ID NO: 2575316 - RNA, 19 nt, Artificial Sequence
  Description of Artificial Sequence: Synthetic oligonucleotide
  Sense strand starting at position 2778 of SEQ ID NO: 1889041
guccgagucuucuuuccuu

SEQ ID NO: 2575317 - RNA, 19 nt, Artificial Sequence
  Description of Artificial Sequence: Synthetic oligonucleotide
  Antisense strand to SEQ ID NO: 2575316
aaggaaagaagacucggac

SEQ ID NO: 2575318 - RNA, 19 nt, Artificial Sequence
  Description of Artificial Sequence: Synthetic oligonucleotide
  Sense strand starting at position 2781 of SEQ ID NO: 1889041
cgagucuucuuuccuuaca

SEQ ID NO: 2575319 - RNA, 19 nt, Artificial Sequence
  Description of Artificial Sequence: Synthetic oligonucleotide
  Antisense strand to SEQ ID NO: 2575318
uguaaggaaagaagacucg

SEQ ID NO: 2575320 - RNA, 19 nt, Artificial Sequence
  Description of Artificial Sequence: Synthetic oligonucleotide
  Sense strand starting at position 2812 of SEQ ID NO: 1889041
gagguuaauuuagguccua

SEQ ID NO: 2575321 - RNA, 19 nt, Artificial Sequence
  Description of Artificial Sequence: Synthetic oligonucleotide
  Antisense strand to SEQ ID NO: 2575320
uaggaccuaaauuaaccuc

SEQ ID NO: 2575322 - RNA, 19 nt, Artificial Sequence
  Description of Artificial Sequence: Synthetic oligonucleotide
  Sense strand starting at position 3034 of SEQ ID NO: 1889041
uccagaacuccgugacuuu

SEQ ID NO: 2575323 - RNA, 19 nt, Artificial Sequence
  Description of Artificial Sequence: Synthetic oligonucleotide
  Antisense strand to SEQ ID NO: 2575322
aaagucacggaguucugga

SEQ ID NO: 2575324 - RNA, 19 nt, Artificial Sequence
  Description of Artificial Sequence: Synthetic oligonucleotide
  Sense strand starting at position 3068 of SEQ ID NO: 1889041
ggacaucucuacuugccau

SEQ ID NO: 2575325 - RNA, 19 nt, Artificial Sequence
  Description of Artificial Sequence: Synthetic oligonucleotide
  Antisense strand to SEQ ID NO: 2575324
auggcaaguagagaugucc

SEQ ID NO: 2575326 - RNA, 19 nt, Artificial Sequence
  Description of Artificial Sequence: Synthetic oligonucleotide
  Sense strand starting at position 3111 of SEQ ID NO: 1889041
gagacugcuugugccuaau

SEQ ID NO: 2575327 - RNA, 19 nt, Artificial Sequence
  Description of Artificial Sequence: Synthetic oligonucleotide
  Antisense strand to SEQ ID NO: 2575326
auuaggcacaagcagucuc

SEQ ID NO: 2575328 - RNA, 19 nt, Artificial Sequence
  Description of Artificial Sequence: Synthetic oligonucleotide
  Sense strand starting at position 3113 of SEQ ID NO: 1889041
gacugcuugugccuaauga

SEQ ID NO: 2575329 - RNA, 19 nt, Artificial Sequence
  Description of Artificial Sequence: Synthetic oligonucleotide
  Antisense strand to SEQ ID NO: 2575328
ucauuaggcacaagcaguc

SEQ ID NO: 2575330 - RNA, 19 nt, Artificial Sequence
  Description of Artificial Sequence: Synthetic oligonucleotide
  Sense strand starting at position 3114 of SEQ ID NO: 1889041
acugcuugugccuaaugaa

SEQ ID NO: 2575331 - RNA, 19 nt, Artificial Sequence
  Description of Artificial Sequence: Synthetic oligonucleotide
  Antisense strand to SEQ ID NO: 2575330
uucauuaggcacaagcagu

SEQ ID NO: 2575332 - RNA, 19 nt, Artificial Sequence
  Description of Artificial Sequence: Synthetic oligonucleotide
  Sense strand starting at position 3342 of SEQ ID NO: 1889041
agugccuugcccugagacu

SEQ ID NO: 2575333 - RNA, 19 nt, Artificial Sequence
  Description of Artificial Sequence: Synthetic oligonucleotide
  Antisense strand to SEQ ID NO: 2575332
agucucagggcaaggcacu

SEQ ID NO: 2575334 - RNA, 19 nt, Artificial Sequence
  Description of Artificial Sequence: Synthetic oligonucleotide
  Sense strand starting at position 3400 of SEQ ID NO: 1889041
ggucuugaaucccacugau

SEQ ID NO: 2575335 - RNA, 19 nt, Artificial Sequence
  Description of Artificial Sequence: Synthetic oligonucleotide
  Antisense strand to SEQ ID NO: 2575334
aucagugggauucaagacc

SEQ ID NO: 2575336 - RNA, 19 nt, Artificial Sequence
  Description of Artificial Sequence: Synthetic oligonucleotide
  Sense strand starting at position 3465 of SEQ ID NO: 1889041
acagaaauaugccaaagac

SEQ ID NO: 2575337 - RNA, 19 nt, Artificial Sequence
  Description of Artificial Sequence: Synthetic oligonucleotide
  Antisense strand to SEQ ID NO: 2575336
gucuuuggcauauuucugu

SEQ ID NO: 2575338 - RNA, 19 nt, Artificial Sequence
  Description of Artificial Sequence: Synthetic oligonucleotide
  Sense strand starting at position 3516 of SEQ ID NO: 1889041
ggauguucuuucuuuccau

SEQ ID NO: 2575339 - RNA, 19 nt, Artificial Sequence
  Description of Artificial Sequence: Synthetic oligonucleotide
  Antisense strand to SEQ ID NO: 2575338
auggaaagaaagaacaucc

SEQ ID NO: 2575340 - RNA, 19 nt, Artificial Sequence
  Description of Artificial Sequence: Synthetic oligonucleotide
  Sense strand starting at position 3519 of SEQ ID NO: 1889041
uguucuuucuuuccaugga

SEQ ID NO: 2575341 - RNA, 19 nt, Artificial Sequence
  Description of Artificial Sequence: Synthetic oligonucleotide
  Antisense strand to SEQ ID NO: 2575340
uccauggaaagaaagaaca

SEQ ID NO: 2575342 - RNA, 19 nt, Artificial Sequence
  Description of Artificial Sequence: Synthetic oligonucleotide
  Sense strand starting at position 3560 of SEQ ID NO: 1889041
gcgggaggcguguacauau

SEQ ID NO: 2575343 - RNA, 19 nt, Artificial Sequence
  Description of Artificial Sequence: Synthetic oligonucleotide
  Antisense strand to SEQ ID NO: 2575342
auauguacacgccucccgc

SEQ ID NO: 2575344 - RNA, 19 nt, Artificial Sequence
  Description of Artificial Sequence: Synthetic oligonucleotide
  Sense strand starting at position 3592 of SEQ ID NO: 1889041
acacuuggcuccuuugauu

SEQ ID NO: 2575345 - RNA, 19 nt, Artificial Sequence
  Description of Artificial Sequence: Synthetic oligonucleotide
  Antisense strand to SEQ ID NO: 2575344
aaucaaaggagccaagugu

SEQ ID NO: 2575346 - RNA, 19 nt, Artificial Sequence
  Description of Artificial Sequence: Synthetic oligonucleotide
  Sense strand starting at position 3650 of SEQ ID NO: 1889041
uugcgaccuccugaaggaa

SEQ ID NO: 2575347 - RNA, 19 nt, Artificial Sequence
  Description of Artificial Sequence: Synthetic oligonucleotide
  Antisense strand to SEQ ID NO: 2575346
uuccuucaggaggucgcaa

SEQ ID NO: 2575348 - RNA, 19 nt, Artificial Sequence
  Description of Artificial Sequence: Synthetic oligonucleotide
  Sense strand starting at position 36 of SEQ ID NO: 1889042
cagccugagucuuuccagu

SEQ ID NO: 2575349 - RNA, 19 nt, Artificial Sequence
  Description of Artificial Sequence: Synthetic oligonucleotide
  Antisense strand to SEQ ID NO: 2575348
acuggaaagacucaggcug

SEQ ID NO: 2575350 - RNA, 19 nt, Artificial Sequence
  Description of Artificial Sequence: Synthetic oligonucleotide
  Sense strand starting at position 118 of SEQ ID NO: 1889042
uucugcauccgggacuuau

SEQ ID NO: 2575351 - RNA, 19 nt, Artificial Sequence
  Description of Artificial Sequence: Synthetic oligonucleotide
  Antisense strand to SEQ ID NO: 2575350
auaagucccggaugcagaa

SEQ ID NO: 2575352 - RNA, 19 nt, Artificial Sequence
  Description of Artificial Sequence: Synthetic oligonucleotide
  Sense strand starting at position 129 of SEQ ID NO: 1889042
ggacuuaucugcccgugag

SEQ ID NO: 2575353 - RNA, 19 nt, Artificial Sequence
  Description of Artificial Sequence: Synthetic oligonucleotide
  Antisense strand to SEQ ID NO: 2575352
cucacgggcagauaagucc

SEQ ID NO: 2575354 - RNA, 19 nt, Artificial Sequence
  Description of Artificial Sequence: Synthetic oligonucleotide
  Sense strand starting at position 130 of SEQ ID NO: 1889042
gacuuaucugcccgugagu

SEQ ID NO: 2575355 - RNA, 19 nt, Artificial Sequence
  Description of Artificial Sequence: Synthetic oligonucleotide
  Antisense strand to SEQ ID NO: 2575354
acucacgggcagauaaguc

SEQ ID NO: 2575356 - RNA, 19 nt, Artificial Sequence
  Description of Artificial Sequence: Synthetic oligonucleotide
  Sense strand starting at position 132 of SEQ ID NO: 1889042
cuuaucugcccgugaguaa

SEQ ID NO: 2575357 - RNA, 19 nt, Artificial Sequence
  Description of Artificial Sequence: Synthetic oligonucleotide
  Antisense strand to SEQ ID NO: 2575356
uuacucacgggcagauaag

SEQ ID NO: 2575358 - RNA, 19 nt, Artificial Sequence
  Description of Artificial Sequence: Synthetic oligonucleotide
  Sense strand starting at position 133 of SEQ ID NO: 1889042
uuaucugcccgugaguaag

SEQ ID NO: 2575359 - RNA, 19 nt, Artificial Sequence
  Description of Artificial Sequence: Synthetic oligonucleotide
  Antisense strand to SEQ ID NO: 2575358
cuuacucacgggcagauaa

SEQ ID NO: 2575360 - RNA, 19 nt, Artificial Sequence
  Description of Artificial Sequence: Synthetic oligonucleotide
  Sense strand starting at position 216 of SEQ ID NO: 1889042
augacaaguuuccuaugga

SEQ ID NO: 2575361 - RNA, 19 nt, Artificial Sequence
  Description of Artificial Sequence: Synthetic oligonucleotide
  Antisense strand to SEQ ID NO: 2575360
uccauaggaaacuugucau

SEQ ID NO: 2575362 - RNA, 19 nt, Artificial Sequence
  Description of Artificial Sequence: Synthetic oligonucleotide
  Sense strand starting at position 217 of SEQ ID NO: 1889042
ugacaaguuuccuauggac

SEQ ID NO: 2575363 - RNA, 19 nt, Artificial Sequence
  Description of Artificial Sequence: Synthetic oligonucleotide
  Antisense strand to SEQ ID NO: 2575362
guccauaggaaacuuguca

SEQ ID NO: 2575364 - RNA, 19 nt, Artificial Sequence
  Description of Artificial Sequence: Synthetic oligonucleotide
  Sense strand starting at position 219 of SEQ ID NO: 1889042
acaaguuuccuauggacau

SEQ ID NO: 2575365 - RNA, 19 nt, Artificial Sequence
  Description of Artificial Sequence: Synthetic oligonucleotide
  Antisense strand to SEQ ID NO: 2575364
auguccauaggaaacuugu

SEQ ID NO: 2575366 - RNA, 19 nt, Artificial Sequence
  Description of Artificial Sequence: Synthetic oligonucleotide
  Sense strand starting at position 279 of SEQ ID NO: 1889042
agcaguuucccuggagcca

SEQ ID NO: 2575367 - RNA, 19 nt, Artificial Sequence
  Description of Artificial Sequence: Synthetic oligonucleotide
  Antisense strand to SEQ ID NO: 2575366
uggcuccagggaaacugcu

SEQ ID NO: 2575368 - RNA, 19 nt, Artificial Sequence
  Description of Artificial Sequence: Synthetic oligonucleotide
  Sense strand starting at position 295 of SEQ ID NO: 1889042
ccaggcuuacccugaaaga

SEQ ID NO: 2575369 - RNA, 19 nt, Artificial Sequence
  Description of Artificial Sequence: Synthetic oligonucleotide
  Antisense strand to SEQ ID NO: 2575368
ucuuucaggguaagccugg

SEQ ID NO: 2575370 - RNA, 19 nt, Artificial Sequence
  Description of Artificial Sequence: Synthetic oligonucleotide
  Sense strand starting at position 476 of SEQ ID NO: 1889042
uguucuguugaugagaaau

SEQ ID NO: 2575371 - RNA, 19 nt, Artificial Sequence
  Description of Artificial Sequence: Synthetic oligonucleotide
  Antisense strand to SEQ ID NO: 2575370
auuucucaucaacagaaca

SEQ ID NO: 2575372 - RNA, 19 nt, Artificial Sequence
  Description of Artificial Sequence: Synthetic oligonucleotide
  Sense strand starting at position 478 of SEQ ID NO: 1889042
uucuguugaugagaaauga

SEQ ID NO: 2575373 - RNA, 19 nt, Artificial Sequence
  Description of Artificial Sequence: Synthetic oligonucleotide
  Antisense strand to SEQ ID NO: 2575372
ucauuucucaucaacagaa

SEQ ID NO: 2575374 - RNA, 19 nt, Artificial Sequence
  Description of Artificial Sequence: Synthetic oligonucleotide
  Sense strand starting at position 482 of SEQ ID NO: 1889042
guugaugagaaaugagcau

SEQ ID NO: 2575375 - RNA, 19 nt, Artificial Sequence
  Description of Artificial Sequence: Synthetic oligonucleotide
  Antisense strand to SEQ ID NO: 2575374
augcucauuucucaucaac

SEQ ID NO: 2575376 - RNA, 19 nt, Artificial Sequence
  Description of Artificial Sequence: Synthetic oligonucleotide
  Sense strand starting at position 488 of SEQ ID NO: 1889042
gagaaaugagcauggccaa

SEQ ID NO: 2575377 - RNA, 19 nt, Artificial Sequence
  Description of Artificial Sequence: Synthetic oligonucleotide
  Antisense strand to SEQ ID NO: 2575376
uuggccaugcucauuucuc

SEQ ID NO: 2575378 - RNA, 19 nt, Artificial Sequence
  Description of Artificial Sequence: Synthetic oligonucleotide
  Sense strand starting at position 489 of SEQ ID NO: 1889042
agaaaugagcauggccaau

SEQ ID NO: 2575379 - RNA, 19 nt, Artificial Sequence
  Description of Artificial Sequence: Synthetic oligonucleotide
  Antisense strand to SEQ ID NO: 2575378
auuggccaugcucauuucu

SEQ ID NO: 2575380 - RNA, 19 nt, Artificial Sequence
  Description of Artificial Sequence: Synthetic oligonucleotide
  Sense strand starting at position 495 of SEQ ID NO: 1889042
gagcauggccaauaugaac

SEQ ID NO: 2575381 - RNA, 19 nt, Artificial Sequence
  Description of Artificial Sequence: Synthetic oligonucleotide
  Antisense strand to SEQ ID NO: 2575380
guucauauuggccaugcuc

SEQ ID NO: 2575382 - RNA, 19 nt, Artificial Sequence
  Description of Artificial Sequence: Synthetic oligonucleotide
  Sense strand starting at position 520 of SEQ ID NO: 1889042
agaggcuauuacuggguua

SEQ ID NO: 2575383 - RNA, 19 nt, Artificial Sequence
  Description of Artificial Sequence: Synthetic oligonucleotide
  Antisense strand to SEQ ID NO: 2575382
uaacccaguaauagccucu

SEQ ID NO: 2575384 - RNA, 19 nt, Artificial Sequence
  Description of Artificial Sequence: Synthetic oligonucleotide
  Sense strand starting at position 522 of SEQ ID NO: 1889042
aggcuauuacuggguuauu

SEQ ID NO: 2575385 - RNA, 19 nt, Artificial Sequence
  Description of Artificial Sequence: Synthetic oligonucleotide
  Antisense strand to SEQ ID NO: 2575384
aauaacccaguaauagccu

SEQ ID NO: 2575386 - RNA, 19 nt, Artificial Sequence
  Description of Artificial Sequence: Synthetic oligonucleotide
  Sense strand starting at position 531 of SEQ ID NO: 1889042
cuggguuauuuguaaauca

SEQ ID NO: 2575387 - RNA, 19 nt, Artificial Sequence
  Description of Artificial Sequence: Synthetic oligonucleotide
  Antisense strand to SEQ ID NO: 2575386
ugauuuacaaauaacccag

SEQ ID NO: 2575388 - RNA, 19 nt, Artificial Sequence
  Description of Artificial Sequence: Synthetic oligonucleotide
  Sense strand starting at position 541 of SEQ ID NO: 1889042
uguaaaucauuagaaggaa

SEQ ID NO: 2575389 - RNA, 19 nt, Artificial Sequence
  Description of Artificial Sequence: Synthetic oligonucleotide
  Antisense strand to SEQ ID NO: 2575388
uuccuucuaaugauuuaca

SEQ ID NO: 2575390 - RNA, 19 nt, Artificial Sequence
  Description of Artificial Sequence: Synthetic oligonucleotide
  Sense strand starting at position 1088 of SEQ ID NO: 1889042
guggcuccugccuauaguu

SEQ ID NO: 2575391 - RNA, 19 nt, Artificial Sequence
  Description of Artificial Sequence: Synthetic oligonucleotide
  Antisense strand to SEQ ID NO: 2575390
aacuauaggcaggagccac

SEQ ID NO: 2575392 - RNA, 19 nt, Artificial Sequence
  Description of Artificial Sequence: Synthetic oligonucleotide
  Sense strand starting at position 1342 of SEQ ID NO: 1889042
cccggcuucuaauaauuaa

SEQ ID NO: 2575393 - RNA, 19 nt, Artificial Sequence
  Description of Artificial Sequence: Synthetic oligonucleotide
  Antisense strand to SEQ ID NO: 2575392
uuaauuauuagaagccggg

SEQ ID NO: 2575394 - RNA, 19 nt, Artificial Sequence
  Description of Artificial Sequence: Synthetic oligonucleotide
  Sense strand starting at position 1791 of SEQ ID NO: 1889042
gugggaggauccuccauga

SEQ ID NO: 2575395 - RNA, 19 nt, Artificial Sequence
  Description of Artificial Sequence: Synthetic oligonucleotide
  Antisense strand to SEQ ID NO: 2575394
ucauggaggauccucccac

SEQ ID NO: 2575396 - RNA, 19 nt, Artificial Sequence
  Description of Artificial Sequence: Synthetic oligonucleotide
  Sense strand starting at position 1804 of SEQ ID NO: 1889042
ccaugaugauccuccugaa

SEQ ID NO: 2575397 - RNA, 19 nt, Artificial Sequence
  Description of Artificial Sequence: Synthetic oligonucleotide
  Antisense strand to SEQ ID NO: 2575396
uucaggaggaucaucaugg

SEQ ID NO: 2575398 - RNA, 19 nt, Artificial Sequence
  Description of Artificial Sequence: Synthetic oligonucleotide
  Sense strand starting at position 1807 of SEQ ID NO: 1889042
ugaugauccuccugaaagg

SEQ ID NO: 2575399 - RNA, 19 nt, Artificial Sequence
  Description of Artificial Sequence: Synthetic oligonucleotide
  Antisense strand to SEQ ID NO: 2575398
ccuuucaggaggaucauca

SEQ ID NO: 2575400 - RNA, 19 nt, Artificial Sequence
  Description of Artificial Sequence: Synthetic oligonucleotide
  Sense strand starting at position 2130 of SEQ ID NO: 1889042
gggucuaucaguugaggcu

SEQ ID NO: 2575401 - RNA, 19 nt, Artificial Sequence
  Description of Artificial Sequence: Synthetic oligonucleotide
  Antisense strand to SEQ ID NO: 2575400
agccucaacugauagaccc

SEQ ID NO: 2575402 - RNA, 19 nt, Artificial Sequence
  Description of Artificial Sequence: Synthetic oligonucleotide
  Sense strand starting at position 2235 of SEQ ID NO: 1889042
gaguaugcaugcucugaua

SEQ ID NO: 2575403 - RNA, 19 nt, Artificial Sequence
  Description of Artificial Sequence: Synthetic oligonucleotide
  Antisense strand to SEQ ID NO: 2575402
uaucagagcaugcauacuc

SEQ ID NO: 2575404 - RNA, 19 nt, Artificial Sequence
  Description of Artificial Sequence: Synthetic oligonucleotide
  Sense strand starting at position 2237 of SEQ ID NO: 1889042
guaugcaugcucugauauu

SEQ ID NO: 2575405 - RNA, 19 nt, Artificial Sequence
  Description of Artificial Sequence: Synthetic oligonucleotide
  Antisense strand to SEQ ID NO: 2575404
aauaucagagcaugcauac

SEQ ID NO: 2575406 - RNA, 19 nt, Artificial Sequence
  Description of Artificial Sequence: Synthetic oligonucleotide
  Sense strand starting at position 2278 of SEQ ID NO: 1889042
agaguacucaugugcugau

SEQ ID NO: 2575407 - RNA, 19 nt, Artificial Sequence
  Description of Artificial Sequence: Synthetic oligonucleotide
  Antisense strand to SEQ ID NO: 2575406
aucagcacaugaguacucu

SEQ ID NO: 2575408 - RNA, 19 nt, Artificial Sequence
  Description of Artificial Sequence: Synthetic oligonucleotide
  Sense strand starting at position 2279 of SEQ ID NO: 1889042
gaguacucaugugcugauu

SEQ ID NO: 2575409 - RNA, 19 nt, Artificial Sequence
  Description of Artificial Sequence: Synthetic oligonucleotide
  Antisense strand to SEQ ID NO: 2575408
aaucagcacaugaguacuc

SEQ ID NO: 2575410 - RNA, 19 nt, Artificial Sequence
  Description of Artificial Sequence: Synthetic oligonucleotide
  Sense strand starting at position 2340 of SEQ ID NO: 1889042
gugcauuuguuauccaguu

SEQ ID NO: 2575411 - RNA, 19 nt, Artificial Sequence
  Description of Artificial Sequence: Synthetic oligonucleotide
  Antisense strand to SEQ ID NO: 2575410
aacuggauaacaaaugcac

SEQ ID NO: 2575412 - RNA, 19 nt, Artificial Sequence
  Description of Artificial Sequence: Synthetic oligonucleotide
  Sense strand starting at position 2341 of SEQ ID NO: 1889042
ugcauuuguuauccaguuu

SEQ ID NO: 2575413 - RNA, 19 nt, Artificial Sequence
  Description of Artificial Sequence: Synthetic oligonucleotide
  Antisense strand to SEQ ID NO: 2575412
aaacuggauaacaaaugca

SEQ ID NO: 2575414 - RNA, 19 nt, Artificial Sequence
  Description of Artificial Sequence: Synthetic oligonucleotide
  Sense strand starting at position 2452 of SEQ ID NO: 1889042
guaguaacgucagaaauuu

SEQ ID NO: 2575415 - RNA, 19 nt, Artificial Sequence
  Description of Artificial Sequence: Synthetic oligonucleotide
  Antisense strand to SEQ ID NO: 2575414
aaauuucugacguuacuac

SEQ ID NO: 2575416 - RNA, 19 nt, Artificial Sequence
  Description of Artificial Sequence: Synthetic oligonucleotide
  Sense strand starting at position 2523 of SEQ ID NO: 1889042
gcugguggaucguuugaac

SEQ ID NO: 2575417 - RNA, 19 nt, Artificial Sequence
  Description of Artificial Sequence: Synthetic oligonucleotide
  Antisense strand to SEQ ID NO: 2575416
guucaaacgauccaccagc

SEQ ID NO: 2575418 - RNA, 19 nt, Artificial Sequence
  Description of Artificial Sequence: Synthetic oligonucleotide
  Sense strand starting at position 2604 of SEQ ID NO: 1889042
gcgauacccugucccuuau

SEQ ID NO: 2575419 - RNA, 19 nt, Artificial Sequence
  Description of Artificial Sequence: Synthetic oligonucleotide
  Antisense strand to SEQ ID NO: 2575418
auaagggacaggguaucgc

SEQ ID NO: 2575420 - RNA, 19 nt, Artificial Sequence
  Description of Artificial Sequence: Synthetic oligonucleotide
  Sense strand starting at position 2907 of SEQ ID NO: 1889042
agaacaaucugggaugcau

SEQ ID NO: 2575421 - RNA, 19 nt, Artificial Sequence
  Description of Artificial Sequence: Synthetic oligonucleotide
  Antisense strand to SEQ ID NO: 2575420
augcaucccagauuguucu

SEQ ID NO: 2575422 - RNA, 19 nt, Artificial Sequence
  Description of Artificial Sequence: Synthetic oligonucleotide
  Sense strand starting at position 3277 of SEQ ID NO: 1889042
ccuuuaguccagcacaaag

SEQ ID NO: 2575423 - RNA, 19 nt, Artificial Sequence
  Description of Artificial Sequence: Synthetic oligonucleotide
  Antisense strand to SEQ ID NO: 2575422
cuuugugcuggacuaaagg

SEQ ID NO: 2575424 - RNA, 19 nt, Artificial Sequence
  Description of Artificial Sequence: Synthetic oligonucleotide
  Sense strand starting at position 3300 of SEQ ID NO: 1889042
uuaugugcaucuuccgauu

SEQ ID NO: 2575425 - RNA, 19 nt, Artificial Sequence
  Description of Artificial Sequence: Synthetic oligonucleotide
  Antisense strand to SEQ ID NO: 2575424
aaucggaagaugcacauaa

SEQ ID NO: 2575426 - RNA, 19 nt, Artificial Sequence
  Description of Artificial Sequence: Synthetic oligonucleotide
  Sense strand starting at position 3401 of SEQ ID NO: 1889042
cagucugcucgaggucaca

SEQ ID NO: 2575427 - RNA, 19 nt, Artificial Sequence
  Description of Artificial Sequence: Synthetic oligonucleotide
  Antisense strand to SEQ ID NO: 2575426
ugugaccucgagcagacug

SEQ ID NO: 2575428 - RNA, 19 nt, Artificial Sequence
  Description of Artificial Sequence: Synthetic oligonucleotide
  Sense strand starting at position 282 of SEQ ID NO: 1889043
ggacgugacuguguaacua

SEQ ID NO: 2575429 - RNA, 19 nt, Artificial Sequence
  Description of Artificial Sequence: Synthetic oligonucleotide
  Antisense strand to SEQ ID NO: 2575428
uaguuacacagucacgucc

SEQ ID NO: 2575430 - RNA, 19 nt, Artificial Sequence
  Description of Artificial Sequence: Synthetic oligonucleotide
  Sense strand starting at position 449 of SEQ ID NO: 1889043
ugaacagauuuagaggcua

SEQ ID NO: 2575431 - RNA, 19 nt, Artificial Sequence
  Description of Artificial Sequence: Synthetic oligonucleotide
  Antisense strand to SEQ ID NO: 2575430
uagccucuaaaucuguuca

SEQ ID NO: 2575432 - RNA, 19 nt, Artificial Sequence
  Description of Artificial Sequence: Synthetic oligonucleotide
  Sense strand starting at position 502 of SEQ ID NO: 1889043
gagcuagaaucucugagac

SEQ ID NO: 2575433 - RNA, 19 nt, Artificial Sequence
  Description of Artificial Sequence: Synthetic oligonucleotide
  Antisense strand to SEQ ID NO: 2575432
gucucagagauucuagcuc

SEQ ID NO: 2575434 - RNA, 19 nt, Artificial Sequence
  Description of Artificial Sequence: Synthetic oligonucleotide
  Sense strand starting at position 504 of SEQ ID NO: 1889043
gcuagaaucucugagacua

SEQ ID NO: 2575435 - RNA, 19 nt, Artificial Sequence
  Description of Artificial Sequence: Synthetic oligonucleotide
  Antisense strand to SEQ ID NO: 2575434
uagucucagagauucuagc

SEQ ID NO: 2575436 - RNA, 19 nt, Artificial Sequence
  Description of Artificial Sequence: Synthetic oligonucleotide
  Sense strand starting at position 821 of SEQ ID NO: 1889043
agcgaaacccucuacuaaa

SEQ ID NO: 2575437 - RNA, 19 nt, Artificial Sequence
  Description of Artificial Sequence: Synthetic oligonucleotide
  Antisense strand to SEQ ID NO: 2575436
uuuaguagaggguuucgcu

SEQ ID NO: 2575438 - RNA, 19 nt, Artificial Sequence
  Description of Artificial Sequence: Synthetic oligonucleotide
  Sense strand starting at position 1579 of SEQ ID NO: 1889043
gcgggagaauccuccauga

SEQ ID NO: 2575439 - RNA, 19 nt, Artificial Sequence
  Description of Artificial Sequence: Synthetic oligonucleotide
  Antisense strand to SEQ ID NO: 2575438
ucauggaggauucucccgc

SEQ ID NO: 2575440 - RNA, 19 nt, Artificial Sequence
  Description of Artificial Sequence: Synthetic oligonucleotide
  Sense strand starting at position 2145 of SEQ ID NO: 1889043
gguggauuguuguucaguu

SEQ ID NO: 2575441 - RNA, 19 nt, Artificial Sequence
  Description of Artificial Sequence: Synthetic oligonucleotide
  Antisense strand to SEQ ID NO: 2575440
aacugaacaacaauccacc

SEQ ID NO: 2575442 - RNA, 19 nt, Artificial Sequence
  Description of Artificial Sequence: Synthetic oligonucleotide
  Sense strand starting at position 2265 of SEQ ID NO: 1889043
guaagaaauuugggccuga

SEQ ID NO: 2575443 - RNA, 19 nt, Artificial Sequence
  Description of Artificial Sequence: Synthetic oligonucleotide
  Antisense strand to SEQ ID NO: 2575442
ucaggcccaaauuucuuac

SEQ ID NO: 2575444 - RNA, 19 nt, Artificial Sequence
  Description of Artificial Sequence: Synthetic oligonucleotide
  Sense strand starting at position 2732 of SEQ ID NO: 1889043
ggaacaaucugggauacau

SEQ ID NO: 2575445 - RNA, 19 nt, Artificial Sequence
  Description of Artificial Sequence: Synthetic oligonucleotide
  Antisense strand to SEQ ID NO: 2575444
auguaucccagauuguucc

SEQ ID NO: 2575446 - RNA, 19 nt, Artificial Sequence
  Description of Artificial Sequence: Synthetic oligonucleotide
  Sense strand starting at position 2813 of SEQ ID NO: 1889043
cuacacuucuauguauguu

SEQ ID NO: 2575447 - RNA, 19 nt, Artificial Sequence
  Description of Artificial Sequence: Synthetic oligonucleotide
  Antisense strand to SEQ ID NO: 2575446
aacauacauagaaguguag

SEQ ID NO: 2575448 - RNA, 19 nt, Artificial Sequence
  Description of Artificial Sequence: Synthetic oligonucleotide
  Sense strand starting at position 3132 of SEQ ID NO: 1889043
ugugcaucuucccauugau

SEQ ID NO: 2575449 - RNA, 19 nt, Artificial Sequence
  Description of Artificial Sequence: Synthetic oligonucleotide
  Antisense strand to SEQ ID NO: 2575448
aucaaugggaagaugcaca

SEQ ID NO: 2575450 - RNA, 19 nt, Artificial Sequence
  Description of Artificial Sequence: Synthetic oligonucleotide
  Sense strand starting at position 3226 of SEQ ID NO: 1889043
uaagcagugugcucaaguu

SEQ ID NO: 2575451 - RNA, 19 nt, Artificial Sequence
  Description of Artificial Sequence: Synthetic oligonucleotide
  Antisense strand to SEQ ID NO: 2575450
aacuugagcacacugcuua

SEQ ID NO: 2575452 - RNA, 19 nt, Artificial Sequence
  Description of Artificial Sequence: Synthetic oligonucleotide
  Sense strand starting at position 3475 of SEQ ID NO: 1889043
gccucaaagucagugcuuu

SEQ ID NO: 2575453 - RNA, 19 nt, Artificial Sequence
  Description of Artificial Sequence: Synthetic oligonucleotide
  Antisense strand to SEQ ID NO: 2575452
aaagcacugacuuugaggc

SEQ ID NO: 2575454 - RNA, 19 nt, Artificial Sequence
  Description of Artificial Sequence: Synthetic oligonucleotide
  Sense strand starting at position 3551 of SEQ ID NO: 1889043
cugcaaugguucuuuaaca

SEQ ID NO: 2575455 - RNA, 19 nt, Artificial Sequence
  Description of Artificial Sequence: Synthetic oligonucleotide
  Antisense strand to SEQ ID NO: 2575454
uguuaaagaaccauugcag

SEQ ID NO: 2575456 - RNA, 19 nt, Artificial Sequence
  Description of Artificial Sequence: Synthetic oligonucleotide
  Sense strand starting at position 3552 of SEQ ID NO: 1889043
ugcaaugguucuuuaacau

SEQ ID NO: 2575457 - RNA, 19 nt, Artificial Sequence
  Description of Artificial Sequence: Synthetic oligonucleotide
  Antisense strand to SEQ ID NO: 2575456
auguuaaagaaccauugca

SEQ ID NO: 2575458 - RNA, 19 nt, Artificial Sequence
  Description of Artificial Sequence: Synthetic oligonucleotide
  Sense strand starting at position 3628 of SEQ ID NO: 1889043
ccacaaacuuuguggcaua

SEQ ID NO: 2575459 - RNA, 19 nt, Artificial Sequence
  Description of Artificial Sequence: Synthetic oligonucleotide
  Antisense strand to SEQ ID NO: 2575458
uaugccacaaaguuugugg

SEQ ID NO: 2575460 - RNA, 19 nt, Artificial Sequence
  Description of Artificial Sequence: Synthetic oligonucleotide
  Sense strand starting at position 3754 of SEQ ID NO: 1889043
gggagagaaucuguuccuu

SEQ ID NO: 2575461 - RNA, 19 nt, Artificial Sequence
  Description of Artificial Sequence: Synthetic oligonucleotide
  Antisense strand to SEQ ID NO: 2575460
aaggaacagauucucuccc

SEQ ID NO: 2575462 - RNA, 19 nt, Artificial Sequence
  Description of Artificial Sequence: Synthetic oligonucleotide
  Sense strand starting at position 3786 of SEQ ID NO: 1889043
uccggugauugccagcauu

SEQ ID NO: 2575463 - RNA, 19 nt, Artificial Sequence
  Description of Artificial Sequence: Synthetic oligonucleotide
  Antisense strand to SEQ ID NO: 2575462
aaugcuggcaaucaccgga

SEQ ID NO: 2575464 - RNA, 19 nt, Artificial Sequence
  Description of Artificial Sequence: Synthetic oligonucleotide
  Sense strand starting at position 201 of SEQ ID NO: 1889044
gcuagacacgucugccauu

SEQ ID NO: 2575465 - RNA, 19 nt, Artificial Sequence
  Description of Artificial Sequence: Synthetic oligonucleotide
  Antisense strand to SEQ ID NO: 2575464
aauggcagacgugucuagc

SEQ ID NO: 2575466 - RNA, 19 nt, Artificial Sequence
  Description of Artificial Sequence: Synthetic oligonucleotide
  Sense strand starting at position 264 of SEQ ID NO: 1889044
gauauuccguccugguuga

SEQ ID NO: 2575467 - RNA, 19 nt, Artificial Sequence
  Description of Artificial Sequence: Synthetic oligonucleotide
  Antisense strand to SEQ ID NO: 2575466
ucaaccaggacggaauauc

SEQ ID NO: 2575468 - RNA, 19 nt, Artificial Sequence
  Description of Artificial Sequence: Synthetic oligonucleotide
  Sense strand starting at position 307 of SEQ ID NO: 1889044
gagggaccuuuccuagcuu

SEQ ID NO: 2575469 - RNA, 19 nt, Artificial Sequence
  Description of Artificial Sequence: Synthetic oligonucleotide
  Antisense strand to SEQ ID NO: 2575468
aagcuaggaaaggucccuc

SEQ ID NO: 2575470 - RNA, 19 nt, Artificial Sequence
  Description of Artificial Sequence: Synthetic oligonucleotide
  Sense strand starting at position 437 of SEQ ID NO: 1889044
gaugcuaguugaugauaga

SEQ ID NO: 2575471 - RNA, 19 nt, Artificial Sequence
  Description of Artificial Sequence: Synthetic oligonucleotide
  Antisense strand to SEQ ID NO: 2575470
ucuaucaucaacuagcauc

SEQ ID NO: 2575472 - RNA, 19 nt, Artificial Sequence
  Description of Artificial Sequence: Synthetic oligonucleotide
  Sense strand starting at position 676 of SEQ ID NO: 1889044
ggagcagucuguccugcaa

SEQ ID NO: 2575473 - RNA, 19 nt, Artificial Sequence
  Description of Artificial Sequence: Synthetic oligonucleotide
  Antisense strand to SEQ ID NO: 2575472
uugcaggacagacugcucc

SEQ ID NO: 2575474 - RNA, 19 nt, Artificial Sequence
  Description of Artificial Sequence: Synthetic oligonucleotide
  Sense strand starting at position 678 of SEQ ID NO: 1889044
agcagucuguccugcaaga

SEQ ID NO: 2575475 - RNA, 19 nt, Artificial Sequence
  Description of Artificial Sequence: Synthetic oligonucleotide
  Antisense strand to SEQ ID NO: 2575474
ucuugcaggacagacugcu

SEQ ID NO: 2575476 - RNA, 19 nt, Artificial Sequence
  Description of Artificial Sequence: Synthetic oligonucleotide
  Sense strand starting at position 680 of SEQ ID NO: 1889044
cagucuguccugcaagaga

SEQ ID NO: 2575477 - RNA, 19 nt, Artificial Sequence
  Description of Artificial Sequence: Synthetic oligonucleotide
  Antisense strand to SEQ ID NO: 2575476
ucucuugcaggacagacug

SEQ ID NO: 2575478 - RNA, 19 nt, Artificial Sequence
  Description of Artificial Sequence: Synthetic oligonucleotide
  Sense strand starting at position 1282 of SEQ ID NO: 1889044
aagagaauguagggaguuu

SEQ ID NO: 2575479 - RNA, 19 nt, Artificial Sequence
  Description of Artificial Sequence: Synthetic oligonucleotide
  Antisense strand to SEQ ID NO: 2575478
aaacucccuacauucucuu

SEQ ID NO: 2575480 - RNA, 19 nt, Artificial Sequence
  Description of Artificial Sequence: Synthetic oligonucleotide
  Sense strand starting at position 2091 of SEQ ID NO: 1889044
guuagaaaguucugucccu

SEQ ID NO: 2575481 - RNA, 19 nt, Artificial Sequence
  Description of Artificial Sequence: Synthetic oligonucleotide
  Antisense strand to SEQ ID NO: 2575480
agggacagaacuuucuaac

SEQ ID NO: 2575482 - RNA, 19 nt, Artificial Sequence
  Description of Artificial Sequence: Synthetic oligonucleotide
  Sense strand starting at position 2214 of SEQ ID NO: 1889044
auccuugcgcagugacauu

SEQ ID NO: 2575483 - RNA, 19 nt, Artificial Sequence
  Description of Artificial Sequence: Synthetic oligonucleotide
  Antisense strand to SEQ ID NO: 2575482
aaugucacugcgcaaggau

SEQ ID NO: 2575484 - RNA, 19 nt, Artificial Sequence
  Description of Artificial Sequence: Synthetic oligonucleotide
  Sense strand starting at position 2262 of SEQ ID NO: 1889044
cuuuguugccacugggaca

SEQ ID NO: 2575485 - RNA, 19 nt, Artificial Sequence
  Description of Artificial Sequence: Synthetic oligonucleotide
  Antisense strand to SEQ ID NO: 2575484
ugucccaguggcaacaaag

SEQ ID NO: 2575486 - RNA, 19 nt, Artificial Sequence
  Description of Artificial Sequence: Synthetic oligonucleotide
  Sense strand starting at position 2621 of SEQ ID NO: 1889044
uuuacuuaacgggauguga

SEQ ID NO: 2575487 - RNA, 19 nt, Artificial Sequence
  Description of Artificial Sequence: Synthetic oligonucleotide
  Antisense strand to SEQ ID NO: 2575486
ucacaucccguuaaguaaa

SEQ ID NO: 2575488 - RNA, 19 nt, Artificial Sequence
  Description of Artificial Sequence: Synthetic oligonucleotide
  Sense strand starting at position 2623 of SEQ ID NO: 1889044
uacuuaacgggaugugauu

SEQ ID NO: 2575489 - RNA, 19 nt, Artificial Sequence
  Description of Artificial Sequence: Synthetic oligonucleotide
  Antisense strand to SEQ ID NO: 2575488
aaucacaucccguuaagua

SEQ ID NO: 2575490 - RNA, 19 nt, Artificial Sequence
  Description of Artificial Sequence: Synthetic oligonucleotide
  Sense strand starting at position 2629 of SEQ ID NO: 1889044
acgggaugugauuguggua

SEQ ID NO: 2575491 - RNA, 19 nt, Artificial Sequence
  Description of Artificial Sequence: Synthetic oligonucleotide
  Antisense strand to SEQ ID NO: 2575490
uaccacaaucacaucccgu

SEQ ID NO: 2575492 - RNA, 19 nt, Artificial Sequence
  Description of Artificial Sequence: Synthetic oligonucleotide
  Sense strand starting at position 3123 of SEQ ID NO: 1889044
guuuguuucuuucuuuagu

SEQ ID NO: 2575493 - RNA, 19 nt, Artificial Sequence
  Description of Artificial Sequence: Synthetic oligonucleotide
  Antisense strand to SEQ ID NO: 2575492
acuaaagaaagaaacaaac

SEQ ID NO: 2575494 - RNA, 19 nt, Artificial Sequence
  Description of Artificial Sequence: Synthetic oligonucleotide
  Sense strand starting at position 3126 of SEQ ID NO: 1889044
uguuucuuucuuuaguaga

SEQ ID NO: 2575495 - RNA, 19 nt, Artificial Sequence
  Description of Artificial Sequence: Synthetic oligonucleotide
  Antisense strand to SEQ ID NO: 2575494
ucuacuaaagaaagaaaca

SEQ ID NO: 2575496 - RNA, 19 nt, Artificial Sequence
  Description of Artificial Sequence: Synthetic oligonucleotide
  Sense strand starting at position 3223 of SEQ ID NO: 1889044
acaggagugugccauucuu

SEQ ID NO: 2575497 - RNA, 19 nt, Artificial Sequence
  Description of Artificial Sequence: Synthetic oligonucleotide
  Antisense strand to SEQ ID NO: 2575496
aagaauggcacacuccugu

SEQ ID NO: 2575498 - RNA, 19 nt, Artificial Sequence
  Description of Artificial Sequence: Synthetic oligonucleotide
  Sense strand starting at position 3231 of SEQ ID NO: 1889044
gugccauucuuccugcuca

SEQ ID NO: 2575499 - RNA, 19 nt, Artificial Sequence
  Description of Artificial Sequence: Synthetic oligonucleotide
  Antisense strand to SEQ ID NO: 2575498
ugagcaggaagaauggcac

SEQ ID NO: 2575500 - RNA, 19 nt, Artificial Sequence
  Description of Artificial Sequence: Synthetic oligonucleotide
  Sense strand starting at position 3264 of SEQ ID NO: 1889044
acuuauuuauaggaaagac

SEQ ID NO: 2575501 - RNA, 19 nt, Artificial Sequence
  Description of Artificial Sequence: Synthetic oligonucleotide
  Antisense strand to SEQ ID NO: 2575500
gucuuuccuauaaauaagu

SEQ ID NO: 2575502 - RNA, 19 nt, Artificial Sequence
  Description of Artificial Sequence: Synthetic oligonucleotide
  Sense strand starting at position 44 of SEQ ID NO: 1889045
gggccuugggcugagauua

SEQ ID NO: 2575503 - RNA, 19 nt, Artificial Sequence
  Description of Artificial Sequence: Synthetic oligonucleotide
  Antisense strand to SEQ ID NO: 2575502
uaaucucagcccaaggccc

SEQ ID NO: 2575504 - RNA, 19 nt, Artificial Sequence
  Description of Artificial Sequence: Synthetic oligonucleotide
  Sense strand starting at position 56 of SEQ ID NO: 1889045
gagauuauacacugucaug

SEQ ID NO: 2575505 - RNA, 19 nt, Artificial Sequence
  Description of Artificial Sequence: Synthetic oligonucleotide
  Antisense strand to SEQ ID NO: 2575504
caugacaguguauaaucuc

SEQ ID NO: 2575506 - RNA, 19 nt, Artificial Sequence
  Description of Artificial Sequence: Synthetic oligonucleotide
  Sense strand starting at position 66 of SEQ ID NO: 1889045
acugucaugguuugagauu

SEQ ID NO: 2575507 - RNA, 19 nt, Artificial Sequence
  Description of Artificial Sequence: Synthetic oligonucleotide
  Antisense strand to SEQ ID NO: 2575506
aaucucaaaccaugacagu

SEQ ID NO: 2575508 - RNA, 19 nt, Artificial Sequence
  Description of Artificial Sequence: Synthetic oligonucleotide
  Sense strand starting at position 72 of SEQ ID NO: 1889045
augguuugagauuaugucu

SEQ ID NO: 2575509 - RNA, 19 nt, Artificial Sequence
  Description of Artificial Sequence: Synthetic oligonucleotide
  Antisense strand to SEQ ID NO: 2575508
agacauaaucucaaaccau

SEQ ID NO: 2575510 - RNA, 19 nt, Artificial Sequence
  Description of Artificial Sequence: Synthetic oligonucleotide
  Sense strand starting at position 202 of SEQ ID NO: 1889045
agggcaugccuguaaucca

SEQ ID NO: 2575511 - RNA, 19 nt, Artificial Sequence
  Description of Artificial Sequence: Synthetic oligonucleotide
  Antisense strand to SEQ ID NO: 2575510
uggauuacaggcaugcccu

SEQ ID NO: 2575512 - RNA, 19 nt, Artificial Sequence
  Description of Artificial Sequence: Synthetic oligonucleotide
  Sense strand starting at position 361 of SEQ ID NO: 1889045
acucaaauauguguuuauc

SEQ ID NO: 2575513 - RNA, 19 nt, Artificial Sequence
  Description of Artificial Sequence: Synthetic oligonucleotide
  Antisense strand to SEQ ID NO: 2575512
gauaaacacauauuugagu

SEQ ID NO: 2575514 - RNA, 19 nt, Artificial Sequence
  Description of Artificial Sequence: Synthetic oligonucleotide
  Sense strand starting at position 454 of SEQ ID NO: 1889045
ucaaauguugcugaacuua

SEQ ID NO: 2575515 - RNA, 19 nt, Artificial Sequence
  Description of Artificial Sequence: Synthetic oligonucleotide
  Antisense strand to SEQ ID NO: 2575514
uaaguucagcaacauuuga

SEQ ID NO: 2575516 - RNA, 19 nt, Artificial Sequence
  Description of Artificial Sequence: Synthetic oligonucleotide
  Sense strand starting at position 522 of SEQ ID NO: 1889045
gggcucaccuccucaaaga

SEQ ID NO: 2575517 - RNA, 19 nt, Artificial Sequence
  Description of Artificial Sequence: Synthetic oligonucleotide
  Antisense strand to SEQ ID NO: 2575516
ucuuugaggaggugagccc

SEQ ID NO: 2575518 - RNA, 19 nt, Artificial Sequence
  Description of Artificial Sequence: Synthetic oligonucleotide
  Sense strand starting at position 523 of SEQ ID NO: 1889045
ggcucaccuccucaaagau

SEQ ID NO: 2575519 - RNA, 19 nt, Artificial Sequence
  Description of Artificial Sequence: Synthetic oligonucleotide
  Antisense strand to SEQ ID NO: 2575518
aucuuugaggaggugagcc

SEQ ID NO: 2575520 - RNA, 19 nt, Artificial Sequence
  Description of Artificial Sequence: Synthetic oligonucleotide
  Sense strand starting at position 854 of SEQ ID NO: 1889045
caaagaugcuuucugugau

SEQ ID NO: 2575521 - RNA, 19 nt, Artificial Sequence
  Description of Artificial Sequence: Synthetic oligonucleotide
  Antisense strand to SEQ ID NO: 2575520
aucacagaaagcaucuuug

SEQ ID NO: 2575522 - RNA, 19 nt, Artificial Sequence
  Description of Artificial Sequence: Synthetic oligonucleotide
  Sense strand starting at position 857 of SEQ ID NO: 1889045
agaugcuuucugugaucac

SEQ ID NO: 2575523 - RNA, 19 nt, Artificial Sequence
  Description of Artificial Sequence: Synthetic oligonucleotide
  Antisense strand to SEQ ID NO: 2575522
gugaucacagaaagcaucu

SEQ ID NO: 2575524 - RNA, 19 nt, Artificial Sequence
  Description of Artificial Sequence: Synthetic oligonucleotide
  Sense strand starting at position 860 of SEQ ID NO: 1889045
ugcuuucugugaucacuga

SEQ ID NO: 2575525 - RNA, 19 nt, Artificial Sequence
  Description of Artificial Sequence: Synthetic oligonucleotide
  Antisense strand to SEQ ID NO: 2575524
ucagugaucacagaaagca

SEQ ID NO: 2575526 - RNA, 19 nt, Artificial Sequence
  Description of Artificial Sequence: Synthetic oligonucleotide
  Sense strand starting at position 861 of SEQ ID NO: 1889045
gcuuucugugaucacugaa

SEQ ID NO: 2575527 - RNA, 19 nt, Artificial Sequence
  Description of Artificial Sequence: Synthetic oligonucleotide
  Antisense strand to SEQ ID NO: 2575526
uucagugaucacagaaagc

SEQ ID NO: 2575528 - RNA, 19 nt, Artificial Sequence
  Description of Artificial Sequence: Synthetic oligonucleotide
  Sense strand starting at position 958 of SEQ ID NO: 1889045
cccuguagacuguaaacuu

SEQ ID NO: 2575529 - RNA, 19 nt, Artificial Sequence
  Description of Artificial Sequence: Synthetic oligonucleotide
  Antisense strand to SEQ ID NO: 2575528
aaguuuacagucuacaggg

SEQ ID NO: 2575530 - RNA, 19 nt, Artificial Sequence
  Description of Artificial Sequence: Synthetic oligonucleotide
  Sense strand starting at position 1043 of SEQ ID NO: 1889045
aguauaacuuuggcccaau

SEQ ID NO: 2575531 - RNA, 19 nt, Artificial Sequence
  Description of Artificial Sequence: Synthetic oligonucleotide
  Antisense strand to SEQ ID NO: 2575530
auugggccaaaguuauacu

SEQ ID NO: 2575532 - RNA, 19 nt, Artificial Sequence
  Description of Artificial Sequence: Synthetic oligonucleotide
  Sense strand starting at position 1044 of SEQ ID NO: 1889045
guauaacuuuggcccaaua

SEQ ID NO: 2575533 - RNA, 19 nt, Artificial Sequence
  Description of Artificial Sequence: Synthetic oligonucleotide
  Antisense strand to SEQ ID NO: 2575532
uauugggccaaaguuauac

SEQ ID NO: 2575534 - RNA, 19 nt, Artificial Sequence
  Description of Artificial Sequence: Synthetic oligonucleotide
  Sense strand starting at position 1055 of SEQ ID NO: 1889045
gcccaauaacucugggcuu

SEQ ID NO: 2575535 - RNA, 19 nt, Artificial Sequence
  Description of Artificial Sequence: Synthetic oligonucleotide
  Antisense strand to SEQ ID NO: 2575534
aagcccagaguuauugggc

SEQ ID NO: 2575536 - RNA, 19 nt, Artificial Sequence
  Description of Artificial Sequence: Synthetic oligonucleotide
  Sense strand starting at position 1057 of SEQ ID NO: 1889045
ccaauaacucugggcuugu

SEQ ID NO: 2575537 - RNA, 19 nt, Artificial Sequence
  Description of Artificial Sequence: Synthetic oligonucleotide
  Antisense strand to SEQ ID NO: 2575536
acaagcccagaguuauugg

SEQ ID NO: 2575538 - RNA, 19 nt, Artificial Sequence
  Description of Artificial Sequence: Synthetic oligonucleotide
  Sense strand starting at position 1058 of SEQ ID NO: 1889045
caauaacucugggcuuguu

SEQ ID NO: 2575539 - RNA, 19 nt, Artificial Sequence
  Description of Artificial Sequence: Synthetic oligonucleotide
  Antisense strand to SEQ ID NO: 2575538
aacaagcccagaguuauug

SEQ ID NO: 2575540 - RNA, 19 nt, Artificial Sequence
  Description of Artificial Sequence: Synthetic oligonucleotide
  Sense strand starting at position 1094 of SEQ ID NO: 1889045
guguuuaacagaugaaaug

SEQ ID NO: 2575541 - RNA, 19 nt, Artificial Sequence
  Description of Artificial Sequence: Synthetic oligonucleotide
  Antisense strand to SEQ ID NO: 2575540
cauuucaucuguuaaacac

SEQ ID NO: 2575542 - RNA, 19 nt, Artificial Sequence
  Description of Artificial Sequence: Synthetic oligonucleotide
  Sense strand starting at position 1424 of SEQ ID NO: 1889045
ugauuccaaugucugcaaa

SEQ ID NO: 2575543 - RNA, 19 nt, Artificial Sequence
  Description of Artificial Sequence: Synthetic oligonucleotide
  Antisense strand to SEQ ID NO: 2575542
uuugcagacauuggaauca

SEQ ID NO: 2575544 - RNA, 19 nt, Artificial Sequence
  Description of Artificial Sequence: Synthetic oligonucleotide
  Sense strand starting at position 1435 of SEQ ID NO: 1889045
ucugcaaacuuuguagacu

SEQ ID NO: 2575545 - RNA, 19 nt, Artificial Sequence
  Description of Artificial Sequence: Synthetic oligonucleotide
  Antisense strand to SEQ ID NO: 2575544
agucuacaaaguuugcaga

SEQ ID NO: 2575546 - RNA, 19 nt, Artificial Sequence
  Description of Artificial Sequence: Synthetic oligonucleotide
  Sense strand starting at position 1447 of SEQ ID NO: 1889045
guagacuugucaccaggaa

SEQ ID NO: 2575547 - RNA, 19 nt, Artificial Sequence
  Description of Artificial Sequence: Synthetic oligonucleotide
  Antisense strand to SEQ ID NO: 2575546
uuccuggugacaagucuac

SEQ ID NO: 2575548 - RNA, 19 nt, Artificial Sequence
  Description of Artificial Sequence: Synthetic oligonucleotide
  Sense strand starting at position 1507 of SEQ ID NO: 1889045
cguccagauccucaccaau

SEQ ID NO: 2575549 - RNA, 19 nt, Artificial Sequence
  Description of Artificial Sequence: Synthetic oligonucleotide
  Antisense strand to SEQ ID NO: 2575548
auuggugaggaucuggacg

SEQ ID NO: 2575550 - RNA, 19 nt, Artificial Sequence
  Description of Artificial Sequence: Synthetic oligonucleotide
  Sense strand starting at position 2026 of SEQ ID NO: 1889045
gcgucacuuccguccaaag

SEQ ID NO: 2575551 - RNA, 19 nt, Artificial Sequence
  Description of Artificial Sequence: Synthetic oligonucleotide
  Antisense strand to SEQ ID NO: 2575550
cuuuggacggaagugacgc

SEQ ID NO: 2575552 - RNA, 19 nt, Artificial Sequence
  Description of Artificial Sequence: Synthetic oligonucleotide
  Sense strand starting at position 2141 of SEQ ID NO: 1889045
cucauucgccagcuuugua

SEQ ID NO: 2575553 - RNA, 19 nt, Artificial Sequence
  Description of Artificial Sequence: Synthetic oligonucleotide
  Antisense strand to SEQ ID NO: 2575552
uacaaagcuggcgaaugag

SEQ ID NO: 2575554 - RNA, 19 nt, Artificial Sequence
  Description of Artificial Sequence: Synthetic oligonucleotide
  Sense strand starting at position 2150 of SEQ ID NO: 1889045
cagcuuuguaggugacuga

SEQ ID NO: 2575555 - RNA, 19 nt, Artificial Sequence
  Description of Artificial Sequence: Synthetic oligonucleotide
  Antisense strand to SEQ ID NO: 2575554
ucagucaccuacaaagcug

SEQ ID NO: 2575556 - RNA, 19 nt, Artificial Sequence
  Description of Artificial Sequence: Synthetic oligonucleotide
  Sense strand starting at position 2157 of SEQ ID NO: 1889045
guaggugacugaccuagua

SEQ ID NO: 2575557 - RNA, 19 nt, Artificial Sequence
  Description of Artificial Sequence: Synthetic oligonucleotide
  Antisense strand to SEQ ID NO: 2575556
uacuaggucagucaccuac

SEQ ID NO: 2575558 - RNA, 19 nt, Artificial Sequence
  Description of Artificial Sequence: Synthetic oligonucleotide
  Sense strand starting at position 2280 of SEQ ID NO: 1889045
ggcugcguucccgcagaau

SEQ ID NO: 2575559 - RNA, 19 nt, Artificial Sequence
  Description of Artificial Sequence: Synthetic oligonucleotide
  Antisense strand to SEQ ID NO: 2575558
auucugcgggaacgcagcc

SEQ ID NO: 2575560 - RNA, 19 nt, Artificial Sequence
  Description of Artificial Sequence: Synthetic oligonucleotide
  Sense strand starting at position 2402 of SEQ ID NO: 1889045
ggaugcugucagcagaauc

SEQ ID NO: 2575561 - RNA, 19 nt, Artificial Sequence
  Description of Artificial Sequence: Synthetic oligonucleotide
  Antisense strand to SEQ ID NO: 2575560
gauucugcugacagcaucc

SEQ ID NO: 2575562 - RNA, 19 nt, Artificial Sequence
  Description of Artificial Sequence: Synthetic oligonucleotide
  Sense strand starting at position 2623 of SEQ ID NO: 1889045
gacacuggguaguugauaa

SEQ ID NO: 2575563 - RNA, 19 nt, Artificial Sequence
  Description of Artificial Sequence: Synthetic oligonucleotide
  Antisense strand to SEQ ID NO: 2575562
uuaucaacuacccaguguc

SEQ ID NO: 2575564 - RNA, 19 nt, Artificial Sequence
  Description of Artificial Sequence: Synthetic oligonucleotide
  Sense strand starting at position 2726 of SEQ ID NO: 1889045
cguuucuaaguguacaauu

SEQ ID NO: 2575565 - RNA, 19 nt, Artificial Sequence
  Description of Artificial Sequence: Synthetic oligonucleotide
  Antisense strand to SEQ ID NO: 2575564
aauuguacacuuagaaacg

SEQ ID NO: 2575566 - RNA, 19 nt, Artificial Sequence
  Description of Artificial Sequence: Synthetic oligonucleotide
  Sense strand starting at position 2763 of SEQ ID NO: 1889045
uuacauuguugagcaauca

SEQ ID NO: 2575567 - RNA, 19 nt, Artificial Sequence
  Description of Artificial Sequence: Synthetic oligonucleotide
  Antisense strand to SEQ ID NO: 2575566
ugauugcucaacaauguaa

SEQ ID NO: 2575568 - RNA, 19 nt, Artificial Sequence
  Description of Artificial Sequence: Synthetic oligonucleotide
  Sense strand starting at position 3225 of SEQ ID NO: 1889045
ucaguauuugucuguaacu

SEQ ID NO: 2575569 - RNA, 19 nt, Artificial Sequence
  Description of Artificial Sequence: Synthetic oligonucleotide
  Antisense strand to SEQ ID NO: 2575568
aguuacagacaaauacuga

SEQ ID NO: 2575570 - RNA, 19 nt, Artificial Sequence
  Description of Artificial Sequence: Synthetic oligonucleotide
  Sense strand starting at position 3347 of SEQ ID NO: 1889045
guuuauccaccgcacauau

SEQ ID NO: 2575571 - RNA, 19 nt, Artificial Sequence
  Description of Artificial Sequence: Synthetic oligonucleotide
  Antisense strand to SEQ ID NO: 2575570
auaugugcgguggauaaac

SEQ ID NO: 2575572 - RNA, 19 nt, Artificial Sequence
  Description of Artificial Sequence: Synthetic oligonucleotide
  Sense strand starting at position 3804 of SEQ ID NO: 1889045
gguugaagcuggguaguua

SEQ ID NO: 2575573 - RNA, 19 nt, Artificial Sequence
  Description of Artificial Sequence: Synthetic oligonucleotide
  Antisense strand to SEQ ID NO: 2575572
uaacuacccagcuucaacc

SEQ ID NO: 2575574 - RNA, 19 nt, Artificial Sequence
  Description of Artificial Sequence: Synthetic oligonucleotide
  Sense strand starting at position 3805 of SEQ ID NO: 1889045
guugaagcuggguaguuaa

SEQ ID NO: 2575575 - RNA, 19 nt, Artificial Sequence
  Description of Artificial Sequence: Synthetic oligonucleotide
  Antisense strand to SEQ ID NO: 2575574
uuaacuacccagcuucaac

SEQ ID NO: 2575576 - RNA, 19 nt, Artificial Sequence
  Description of Artificial Sequence: Synthetic oligonucleotide
  Sense strand starting at position 3808 of SEQ ID NO: 1889045
gaagcuggguaguuaaaca

SEQ ID NO: 2575577 - RNA, 19 nt, Artificial Sequence
  Description of Artificial Sequence: Synthetic oligonucleotide
  Antisense strand to SEQ ID NO: 2575576
uguuuaacuacccagcuuc

SEQ ID NO: 2575578 - RNA, 19 nt, Artificial Sequence
  Description of Artificial Sequence: Synthetic oligonucleotide
  Sense strand starting at position 3883 of SEQ ID NO: 1889045
acuagugaugugcauaacu

SEQ ID NO: 2575579 - RNA, 19 nt, Artificial Sequence
  Description of Artificial Sequence: Synthetic oligonucleotide
  Antisense strand to SEQ ID NO: 2575578
aguuaugcacaucacuagu

SEQ ID NO: 2575580 - RNA, 19 nt, Artificial Sequence
  Description of Artificial Sequence: Synthetic oligonucleotide
  Sense strand starting at position 3885 of SEQ ID NO: 1889045
uagugaugugcauaacuac

SEQ ID NO: 2575581 - RNA, 19 nt, Artificial Sequence
  Description of Artificial Sequence: Synthetic oligonucleotide
  Antisense strand to SEQ ID NO: 2575580
guaguuaugcacaucacua

SEQ ID NO: 2575582 - RNA, 19 nt, Artificial Sequence
  Description of Artificial Sequence: Synthetic oligonucleotide
  Sense strand starting at position 40 of SEQ ID NO: 1889046
uagguaaagugguagaguu

SEQ ID NO: 2575583 - RNA, 19 nt, Artificial Sequence
  Description of Artificial Sequence: Synthetic oligonucleotide
  Antisense strand to SEQ ID NO: 2575582
aacucuaccacuuuaccua

SEQ ID NO: 2575584 - RNA, 19 nt, Artificial Sequence
  Description of Artificial Sequence: Synthetic oligonucleotide
  Sense strand starting at position 53 of SEQ ID NO: 1889046
agaguucgaguaggcauua

SEQ ID NO: 2575585 - RNA, 19 nt, Artificial Sequence
  Description of Artificial Sequence: Synthetic oligonucleotide
  Antisense strand to SEQ ID NO: 2575584
uaaugccuacucgaacucu

SEQ ID NO: 2575586 - RNA, 19 nt, Artificial Sequence
  Description of Artificial Sequence: Synthetic oligonucleotide
  Sense strand starting at position 54 of SEQ ID NO: 1889046
gaguucgaguaggcauuaa

SEQ ID NO: 2575587 - RNA, 19 nt, Artificial Sequence
  Description of Artificial Sequence: Synthetic oligonucleotide
  Antisense strand to SEQ ID NO: 2575586
uuaaugccuacucgaacuc

SEQ ID NO: 2575588 - RNA, 19 nt, Artificial Sequence
  Description of Artificial Sequence: Synthetic oligonucleotide
  Sense strand starting at position 64 of SEQ ID NO: 1889046
aggcauuaauuugacaaag

SEQ ID NO: 2575589 - RNA, 19 nt, Artificial Sequence
  Description of Artificial Sequence: Synthetic oligonucleotide
  Antisense strand to SEQ ID NO: 2575588
cuuugucaaauuaaugccu

SEQ ID NO: 2575590 - RNA, 19 nt, Artificial Sequence
  Description of Artificial Sequence: Synthetic oligonucleotide
  Sense strand starting at position 66 of SEQ ID NO: 1889046
gcauuaauuugacaaagag

SEQ ID NO: 2575591 - RNA, 19 nt, Artificial Sequence
  Description of Artificial Sequence: Synthetic oligonucleotide
  Antisense strand to SEQ ID NO: 2575590
cucuuugucaaauuaaugc

SEQ ID NO: 2575592 - RNA, 19 nt, Artificial Sequence
  Description of Artificial Sequence: Synthetic oligonucleotide
  Sense strand starting at position 123 of SEQ ID NO: 1889046
aguuucagggugugcuuaa

SEQ ID NO: 2575593 - RNA, 19 nt, Artificial Sequence
  Description of Artificial Sequence: Synthetic oligonucleotide
  Antisense strand to SEQ ID NO: 2575592
uuaagcacacccugaaacu

SEQ ID NO: 2575594 - RNA, 19 nt, Artificial Sequence
  Description of Artificial Sequence: Synthetic oligonucleotide
  Sense strand starting at position 124 of SEQ ID NO: 1889046
guuucagggugugcuuaaa

SEQ ID NO: 2575595 - RNA, 19 nt, Artificial Sequence
  Description of Artificial Sequence: Synthetic oligonucleotide
  Antisense strand to SEQ ID NO: 2575594
uuuaagcacacccugaaac

SEQ ID NO: 2575596 - RNA, 19 nt, Artificial Sequence
  Description of Artificial Sequence: Synthetic oligonucleotide
  Sense strand starting at position 171 of SEQ ID NO: 1889046
ggccuugaaccguguuuaa

SEQ ID NO: 2575597 - RNA, 19 nt, Artificial Sequence
  Description of Artificial Sequence: Synthetic oligonucleotide
  Antisense strand to SEQ ID NO: 2575596
uuaaacacgguucaaggcc

SEQ ID NO: 2575598 - RNA, 19 nt, Artificial Sequence
  Description of Artificial Sequence: Synthetic oligonucleotide
  Sense strand starting at position 174 of SEQ ID NO: 1889046
cuugaaccguguuuaaacu

SEQ ID NO: 2575599 - RNA, 19 nt, Artificial Sequence
  Description of Artificial Sequence: Synthetic oligonucleotide
  Antisense strand to SEQ ID NO: 2575598
aguuuaaacacgguucaag

SEQ ID NO: 2575600 - RNA, 19 nt, Artificial Sequence
  Description of Artificial Sequence: Synthetic oligonucleotide
  Sense strand starting at position 222 of SEQ ID NO: 1889046
gcuggcugaccuugugaga

SEQ ID NO: 2575601 - RNA, 19 nt, Artificial Sequence
  Description of Artificial Sequence: Synthetic oligonucleotide
  Antisense strand to SEQ ID NO: 2575600
ucucacaaggucagccagc

SEQ ID NO: 2575602 - RNA, 19 nt, Artificial Sequence
  Description of Artificial Sequence: Synthetic oligonucleotide
  Sense strand starting at position 235 of SEQ ID NO: 1889046
gugagagucacuuaagcuc

SEQ ID NO: 2575603 - RNA, 19 nt, Artificial Sequence
  Description of Artificial Sequence: Synthetic oligonucleotide
  Antisense strand to SEQ ID NO: 2575602
gagcuuaagugacucucac

SEQ ID NO: 2575604 - RNA, 19 nt, Artificial Sequence
  Description of Artificial Sequence: Synthetic oligonucleotide
  Sense strand starting at position 309 of SEQ ID NO: 1889046
ggacuucuguaagcauuaa

SEQ ID NO: 2575605 - RNA, 19 nt, Artificial Sequence
  Description of Artificial Sequence: Synthetic oligonucleotide
  Antisense strand to SEQ ID NO: 2575604
uuaaugcuuacagaagucc

SEQ ID NO: 2575606 - RNA, 19 nt, Artificial Sequence
  Description of Artificial Sequence: Synthetic oligonucleotide
  Sense strand starting at position 313 of SEQ ID NO: 1889046
uucuguaagcauuaaauga

SEQ ID NO: 2575607 - RNA, 19 nt, Artificial Sequence
  Description of Artificial Sequence: Synthetic oligonucleotide
  Antisense strand to SEQ ID NO: 2575606
ucauuuaaugcuuacagaa

SEQ ID NO: 2575608 - RNA, 19 nt, Artificial Sequence
  Description of Artificial Sequence: Synthetic oligonucleotide
  Sense strand starting at position 317 of SEQ ID NO: 1889046
guaagcauuaaaugaguga

SEQ ID NO: 2575609 - RNA, 19 nt, Artificial Sequence
  Description of Artificial Sequence: Synthetic oligonucleotide
  Antisense strand to SEQ ID NO: 2575608
ucacucauuuaaugcuuac

SEQ ID NO: 2575610 - RNA, 19 nt, Artificial Sequence
  Description of Artificial Sequence: Synthetic oligonucleotide
  Sense strand starting at position 320 of SEQ ID NO: 1889046
agcauuaaaugagugaaca

SEQ ID NO: 2575611 - RNA, 19 nt, Artificial Sequence
  Description of Artificial Sequence: Synthetic oligonucleotide
  Antisense strand to SEQ ID NO: 2575610
uguucacucauuuaaugcu

SEQ ID NO: 2575612 - RNA, 19 nt, Artificial Sequence
  Description of Artificial Sequence: Synthetic oligonucleotide
  Sense strand starting at position 321 of SEQ ID NO: 1889046
gcauuaaaugagugaacau

SEQ ID NO: 2575613 - RNA, 19 nt, Artificial Sequence
  Description of Artificial Sequence: Synthetic oligonucleotide
  Antisense strand to SEQ ID NO: 2575612
auguucacucauuuaaugc

SEQ ID NO: 2575614 - RNA, 19 nt, Artificial Sequence
  Description of Artificial Sequence: Synthetic oligonucleotide
  Sense strand starting at position 330 of SEQ ID NO: 1889046
gagugaacauguuuaacaa

SEQ ID NO: 2575615 - RNA, 19 nt, Artificial Sequence
  Description of Artificial Sequence: Synthetic oligonucleotide
  Antisense strand to SEQ ID NO: 2575614
uuguuaaacauguucacuc

SEQ ID NO: 2575616 - RNA, 19 nt, Artificial Sequence
  Description of Artificial Sequence: Synthetic oligonucleotide
  Sense strand starting at position 363 of SEQ ID NO: 1889046
cuggcaaaguugucacacu

SEQ ID NO: 2575617 - RNA, 19 nt, Artificial Sequence
  Description of Artificial Sequence: Synthetic oligonucleotide
  Antisense strand to SEQ ID NO: 2575616
agugugacaacuuugccag

SEQ ID NO: 2575618 - RNA, 19 nt, Artificial Sequence
  Description of Artificial Sequence: Synthetic oligonucleotide
  Sense strand starting at position 489 of SEQ ID NO: 1889046
cggugagacugugguacaa

SEQ ID NO: 2575619 - RNA, 19 nt, Artificial Sequence
  Description of Artificial Sequence: Synthetic oligonucleotide
  Antisense strand to SEQ ID NO: 2575618
uuguaccacagucucaccg

SEQ ID NO: 2575620 - RNA, 19 nt, Artificial Sequence
  Description of Artificial Sequence: Synthetic oligonucleotide
  Sense strand starting at position 668 of SEQ ID NO: 1889046
ggacauggacguggugaau

SEQ ID NO: 2575621 - RNA, 19 nt, Artificial Sequence
  Description of Artificial Sequence: Synthetic oligonucleotide
  Antisense strand to SEQ ID NO: 2575620
auucaccacguccaugucc

SEQ ID NO: 2575622 - RNA, 19 nt, Artificial Sequence
  Description of Artificial Sequence: Synthetic oligonucleotide
  Sense strand starting at position 1032 of SEQ ID NO: 1889046
gcggauaagcuaggaaaua

SEQ ID NO: 2575623 - RNA, 19 nt, Artificial Sequence
  Description of Artificial Sequence: Synthetic oligonucleotide
  Antisense strand to SEQ ID NO: 2575622
uauuuccuagcuuauccgc

SEQ ID NO: 2575624 - RNA, 19 nt, Artificial Sequence
  Description of Artificial Sequence: Synthetic oligonucleotide
  Sense strand starting at position 2659 of SEQ ID NO: 1889046
agagacaucugagaaagac

SEQ ID NO: 2575625 - RNA, 19 nt, Artificial Sequence
  Description of Artificial Sequence: Synthetic oligonucleotide
  Antisense strand to SEQ ID NO: 2575624
gucuuucucagaugucucu

SEQ ID NO: 2575626 - RNA, 19 nt, Artificial Sequence
  Description of Artificial Sequence: Synthetic oligonucleotide
  Sense strand starting at position 2824 of SEQ ID NO: 1889046
gccauacccuuguaaucag

SEQ ID NO: 2575627 - RNA, 19 nt, Artificial Sequence
  Description of Artificial Sequence: Synthetic oligonucleotide
  Antisense strand to SEQ ID NO: 2575626
cugauuacaaggguauggc

SEQ ID NO: 2575628 - RNA, 19 nt, Artificial Sequence
  Description of Artificial Sequence: Synthetic oligonucleotide
  Sense strand starting at position 2833 of SEQ ID NO: 1889046
uuguaaucagcuuguccuu

SEQ ID NO: 2575629 - RNA, 19 nt, Artificial Sequence
  Description of Artificial Sequence: Synthetic oligonucleotide
  Antisense strand to SEQ ID NO: 2575628
aaggacaagcugauuacaa

SEQ ID NO: 2575630 - RNA, 19 nt, Artificial Sequence
  Description of Artificial Sequence: Synthetic oligonucleotide
  Sense strand starting at position 2855 of SEQ ID NO: 1889046
cccgaugagcccugauuag

SEQ ID NO: 2575631 - RNA, 19 nt, Artificial Sequence
  Description of Artificial Sequence: Synthetic oligonucleotide
  Antisense strand to SEQ ID NO: 2575630
cuaaucagggcucaucggg

SEQ ID NO: 2575632 - RNA, 19 nt, Artificial Sequence
  Description of Artificial Sequence: Synthetic oligonucleotide
  Sense strand starting at position 3060 of SEQ ID NO: 1889046
cguggauugugccaacaag

SEQ ID NO: 2575633 - RNA, 19 nt, Artificial Sequence
  Description of Artificial Sequence: Synthetic oligonucleotide
  Antisense strand to SEQ ID NO: 2575632
cuuguuggcacaauccacg

SEQ ID NO: 2575634 - RNA, 19 nt, Artificial Sequence
  Description of Artificial Sequence: Synthetic oligonucleotide
  Sense strand starting at position 3291 of SEQ ID NO: 1889046
aggacuauguggugagcaa

SEQ ID NO: 2575635 - RNA, 19 nt, Artificial Sequence
  Description of Artificial Sequence: Synthetic oligonucleotide
  Antisense strand to SEQ ID NO: 2575634
uugcucaccacauaguccu

SEQ ID NO: 2575636 - RNA, 19 nt, Artificial Sequence
  Description of Artificial Sequence: Synthetic oligonucleotide
  Sense strand starting at position 3385 of SEQ ID NO: 1889046
guaagacagguguauauac

SEQ ID NO: 2575637 - RNA, 19 nt, Artificial Sequence
  Description of Artificial Sequence: Synthetic oligonucleotide
  Antisense strand to SEQ ID NO: 2575636
guauauacaccugucuuac

SEQ ID NO: 2575638 - RNA, 19 nt, Artificial Sequence
  Description of Artificial Sequence: Synthetic oligonucleotide
  Sense strand starting at position 3920 of SEQ ID NO: 1889046
cgaggagauccucauguag

SEQ ID NO: 2575639 - RNA, 19 nt, Artificial Sequence
  Description of Artificial Sequence: Synthetic oligonucleotide
  Antisense strand to SEQ ID NO: 2575638
cuacaugaggaucuccucg

SEQ ID NO: 2575640 - RNA, 19 nt, Artificial Sequence
  Description of Artificial Sequence: Synthetic oligonucleotide
  Sense strand starting at position 3968 of SEQ ID NO: 1889046
gggugcugcuuagauauag

SEQ ID NO: 2575641 - RNA, 19 nt, Artificial Sequence
  Description of Artificial Sequence: Synthetic oligonucleotide
  Antisense strand to SEQ ID NO: 2575640
cuauaucuaagcagcaccc

SEQ ID NO: 2575642 - RNA, 19 nt, Artificial Sequence
  Description of Artificial Sequence: Synthetic oligonucleotide
  Sense strand starting at position 3972 of SEQ ID NO: 1889046
gcugcuuagauauagggaa

SEQ ID NO: 2575643 - RNA, 19 nt, Artificial Sequence
  Description of Artificial Sequence: Synthetic oligonucleotide
  Antisense strand to SEQ ID NO: 2575642
uucccuauaucuaagcagc

SEQ ID NO: 2575644 - RNA, 19 nt, Artificial Sequence
  Description of Artificial Sequence: Synthetic oligonucleotide
  Sense strand starting at position 26 of SEQ ID NO: 1889047
ggauaaugcacuggaaugu

SEQ ID NO: 2575645 - RNA, 19 nt, Artificial Sequence
  Description of Artificial Sequence: Synthetic oligonucleotide
  Antisense strand to SEQ ID NO: 2575644
acauuccagugcauuaucc

SEQ ID NO: 2575646 - RNA, 19 nt, Artificial Sequence
  Description of Artificial Sequence: Synthetic oligonucleotide
  Sense strand starting at position 27 of SEQ ID NO: 1889047
gauaaugcacuggaauguu

SEQ ID NO: 2575647 - RNA, 19 nt, Artificial Sequence
  Description of Artificial Sequence: Synthetic oligonucleotide
  Antisense strand to SEQ ID NO: 2575646
aacauuccagugcauuauc

SEQ ID NO: 2575648 - RNA, 19 nt, Artificial Sequence
  Description of Artificial Sequence: Synthetic oligonucleotide
  Sense strand starting at position 63 of SEQ ID NO: 1889047
gaaucaccugaguggcaaa

SEQ ID NO: 2575649 - RNA, 19 nt, Artificial Sequence
  Description of Artificial Sequence: Synthetic oligonucleotide
  Antisense strand to SEQ ID NO: 2575648
uuugccacucaggugauuc

SEQ ID NO: 2575650 - RNA, 19 nt, Artificial Sequence
  Description of Artificial Sequence: Synthetic oligonucleotide
  Sense strand starting at position 202 of SEQ ID NO: 1889047
ggagaaucgcaacaacagu

SEQ ID NO: 2575651 - RNA, 19 nt, Artificial Sequence
  Description of Artificial Sequence: Synthetic oligonucleotide
  Antisense strand to SEQ ID NO: 2575650
acuguuguugcgauucucc

SEQ ID NO: 2575652 - RNA, 19 nt, Artificial Sequence
  Description of Artificial Sequence: Synthetic oligonucleotide
  Sense strand starting at position 753 of SEQ ID NO: 1889047
acagcacgagucgaagaua

SEQ ID NO: 2575653 - RNA, 19 nt, Artificial Sequence
  Description of Artificial Sequence: Synthetic oligonucleotide
  Antisense strand to SEQ ID NO: 2575652
uaucuucgacucgugcugu

SEQ ID NO: 2575654 - RNA, 19 nt, Artificial Sequence
  Description of Artificial Sequence: Synthetic oligonucleotide
  Sense strand starting at position 756 of SEQ ID NO: 1889047
gcacgagucgaagauaaca

SEQ ID NO: 2575655 - RNA, 19 nt, Artificial Sequence
  Description of Artificial Sequence: Synthetic oligonucleotide
  Antisense strand to SEQ ID NO: 2575654
uguuaucuucgacucgugc

SEQ ID NO: 2575656 - RNA, 19 nt, Artificial Sequence
  Description of Artificial Sequence: Synthetic oligonucleotide
  Sense strand starting at position 809 of SEQ ID NO: 1889047
uucccugguccacgacaaa

SEQ ID NO: 2575657 - RNA, 19 nt, Artificial Sequence
  Description of Artificial Sequence: Synthetic oligonucleotide
  Antisense strand to SEQ ID NO: 2575656
uuugucguggaccagggaa

SEQ ID NO: 2575658 - RNA, 19 nt, Artificial Sequence
  Description of Artificial Sequence: Synthetic oligonucleotide
  Sense strand starting at position 878 of SEQ ID NO: 1889047
acguucgagaacuguaaua

SEQ ID NO: 2575659 - RNA, 19 nt, Artificial Sequence
  Description of Artificial Sequence: Synthetic oligonucleotide
  Antisense strand to SEQ ID NO: 2575658
uauuacaguucucgaacgu

SEQ ID NO: 2575660 - RNA, 19 nt, Artificial Sequence
  Description of Artificial Sequence: Synthetic oligonucleotide
  Sense strand starting at position 880 of SEQ ID NO: 1889047
guucgagaacuguaauaua

SEQ ID NO: 2575661 - RNA, 19 nt, Artificial Sequence
  Description of Artificial Sequence: Synthetic oligonucleotide
  Antisense strand to SEQ ID NO: 2575660
uauauuacaguucucgaac

SEQ ID NO: 2575662 - RNA, 19 nt, Artificial Sequence
  Description of Artificial Sequence: Synthetic oligonucleotide
  Sense strand starting at position 883 of SEQ ID NO: 1889047
cgagaacuguaauauacau

SEQ ID NO: 2575663 - RNA, 19 nt, Artificial Sequence
  Description of Artificial Sequence: Synthetic oligonucleotide
  Antisense strand to SEQ ID NO: 2575662
auguauauuacaguucucg

SEQ ID NO: 2575664 - RNA, 19 nt, Artificial Sequence
  Description of Artificial Sequence: Synthetic oligonucleotide
  Sense strand starting at position 912 of SEQ ID NO: 1889047
ccgcaucgaucagaucuuu

SEQ ID NO: 2575665 - RNA, 19 nt, Artificial Sequence
  Description of Artificial Sequence: Synthetic oligonucleotide
  Antisense strand to SEQ ID NO: 2575664
aaagaucugaucgaugcgg

SEQ ID NO: 2575666 - RNA, 19 nt, Artificial Sequence
  Description of Artificial Sequence: Synthetic oligonucleotide
  Sense strand starting at position 917 of SEQ ID NO: 1889047
ucgaucagaucuuuauuaa

SEQ ID NO: 2575667 - RNA, 19 nt, Artificial Sequence
  Description of Artificial Sequence: Synthetic oligonucleotide
  Antisense strand to SEQ ID NO: 2575666
uuaauaaagaucugaucga

SEQ ID NO: 2575668 - RNA, 19 nt, Artificial Sequence
  Description of Artificial Sequence: Synthetic oligonucleotide
  Sense strand starting at position 1218 of SEQ ID NO: 1889047
ucacgaaagucagugaaga

SEQ ID NO: 2575669 - RNA, 19 nt, Artificial Sequence
  Description of Artificial Sequence: Synthetic oligonucleotide
  Antisense strand to SEQ ID NO: 2575668
ucuucacugacuuucguga

SEQ ID NO: 2575670 - RNA, 19 nt, Artificial Sequence
  Description of Artificial Sequence: Synthetic oligonucleotide
  Sense strand starting at position 1353 of SEQ ID NO: 1889047
ccaguccucuggcucuaua

SEQ ID NO: 2575671 - RNA, 19 nt, Artificial Sequence
  Description of Artificial Sequence: Synthetic oligonucleotide
  Antisense strand to SEQ ID NO: 2575670
uauagagccagaggacugg

SEQ ID NO: 2575672 - RNA, 19 nt, Artificial Sequence
  Description of Artificial Sequence: Synthetic oligonucleotide
  Sense strand starting at position 1645 of SEQ ID NO: 1889047
cccuguucucgcugccuga

SEQ ID NO: 2575673 - RNA, 19 nt, Artificial Sequence
  Description of Artificial Sequence: Synthetic oligonucleotide
  Antisense strand to SEQ ID NO: 2575672
ucaggcagcgagaacaggg

SEQ ID NO: 2575674 - RNA, 19 nt, Artificial Sequence
  Description of Artificial Sequence: Synthetic oligonucleotide
  Sense strand starting at position 2072 of SEQ ID NO: 1889047
cggcuauccuaagagaaag

SEQ ID NO: 2575675 - RNA, 19 nt, Artificial Sequence
  Description of Artificial Sequence: Synthetic oligonucleotide
  Antisense strand to SEQ ID NO: 2575674
cuuucucuuaggauagccg

SEQ ID NO: 2575676 - RNA, 19 nt, Artificial Sequence
  Description of Artificial Sequence: Synthetic oligonucleotide
  Sense strand starting at position 2150 of SEQ ID NO: 1889047
guggaaagcgguuggucaa

SEQ ID NO: 2575677 - RNA, 19 nt, Artificial Sequence
  Description of Artificial Sequence: Synthetic oligonucleotide
  Antisense strand to SEQ ID NO: 2575676
uugaccaaccgcuuuccac

SEQ ID NO: 2575678 - RNA, 19 nt, Artificial Sequence
  Description of Artificial Sequence: Synthetic oligonucleotide
  Sense strand starting at position 2151 of SEQ ID NO: 1889047
uggaaagcgguuggucaaa

SEQ ID NO: 2575679 - RNA, 19 nt, Artificial Sequence
  Description of Artificial Sequence: Synthetic oligonucleotide
  Antisense strand to SEQ ID NO: 2575678
uuugaccaaccgcuuucca

SEQ ID NO: 2575680 - RNA, 19 nt, Artificial Sequence
  Description of Artificial Sequence: Synthetic oligonucleotide
  Sense strand starting at position 2153 of SEQ ID NO: 1889047
gaaagcgguuggucaaaga

SEQ ID NO: 2575681 - RNA, 19 nt, Artificial Sequence
  Description of Artificial Sequence: Synthetic oligonucleotide
  Antisense strand to SEQ ID NO: 2575680
ucuuugaccaaccgcuuuc

SEQ ID NO: 2575682 - RNA, 19 nt, Artificial Sequence
  Description of Artificial Sequence: Synthetic oligonucleotide
  Sense strand starting at position 2267 of SEQ ID NO: 1889047
gcucgagucacguggcuua

SEQ ID NO: 2575683 - RNA, 19 nt, Artificial Sequence
  Description of Artificial Sequence: Synthetic oligonucleotide
  Antisense strand to SEQ ID NO: 2575682
uaagccacgugacucgagc

SEQ ID NO: 2575684 - RNA, 19 nt, Artificial Sequence
  Description of Artificial Sequence: Synthetic oligonucleotide
  Sense strand starting at position 2301 of SEQ ID NO: 1889047
ggguuccuguaccacaaua

SEQ ID NO: 2575685 - RNA, 19 nt, Artificial Sequence
  Description of Artificial Sequence: Synthetic oligonucleotide
  Antisense strand to SEQ ID NO: 2575684
uauugugguacaggaaccc

SEQ ID NO: 2575686 - RNA, 19 nt, Artificial Sequence
  Description of Artificial Sequence: Synthetic oligonucleotide
  Sense strand starting at position 2345 of SEQ ID NO: 1889047
cuuugugcugcgugcaauu

SEQ ID NO: 2575687 - RNA, 19 nt, Artificial Sequence
  Description of Artificial Sequence: Synthetic oligonucleotide
  Antisense strand to SEQ ID NO: 2575686
aauugcacgcagcacaaag

SEQ ID NO: 2575688 - RNA, 19 nt, Artificial Sequence
  Description of Artificial Sequence: Synthetic oligonucleotide
  Sense strand starting at position 2378 of SEQ ID NO: 1889047
caaggagagacuugacgua

SEQ ID NO: 2575689 - RNA, 19 nt, Artificial Sequence
  Description of Artificial Sequence: Synthetic oligonucleotide
  Antisense strand to SEQ ID NO: 2575688
uacgucaagucucuccuug

SEQ ID NO: 2575690 - RNA, 19 nt, Artificial Sequence
  Description of Artificial Sequence: Synthetic oligonucleotide
  Sense strand starting at position 2403 of SEQ ID NO: 1889047
acaggcauucccgagcuau

SEQ ID NO: 2575691 - RNA, 19 nt, Artificial Sequence
  Description of Artificial Sequence: Synthetic oligonucleotide
  Antisense strand to SEQ ID NO: 2575690
auagcucgggaaugccugu

SEQ ID NO: 2575692 - RNA, 19 nt, Artificial Sequence
  Description of Artificial Sequence: Synthetic oligonucleotide
  Sense strand starting at position 2413 of SEQ ID NO: 1889047
ccgagcuaugcagguuacu

SEQ ID NO: 2575693 - RNA, 19 nt, Artificial Sequence
  Description of Artificial Sequence: Synthetic oligonucleotide
  Antisense strand to SEQ ID NO: 2575692
aguaaccugcauagcucgg

SEQ ID NO: 2575694 - RNA, 19 nt, Artificial Sequence
  Description of Artificial Sequence: Synthetic oligonucleotide
  Sense strand starting at position 2799 of SEQ ID NO: 1889047
cuagacucacaaugguuaa

SEQ ID NO: 2575695 - RNA, 19 nt, Artificial Sequence
  Description of Artificial Sequence: Synthetic oligonucleotide
  Antisense strand to SEQ ID NO: 2575694
uuaaccauugugagucuag

SEQ ID NO: 2575696 - RNA, 19 nt, Artificial Sequence
  Description of Artificial Sequence: Synthetic oligonucleotide
  Sense strand starting at position 2916 of SEQ ID NO: 1889047
ucacaacuuuaggaaguaa

SEQ ID NO: 2575697 - RNA, 19 nt, Artificial Sequence
  Description of Artificial Sequence: Synthetic oligonucleotide
  Antisense strand to SEQ ID NO: 2575696
uuacuuccuaaaguuguga

SEQ ID NO: 2575698 - RNA, 19 nt, Artificial Sequence
  Description of Artificial Sequence: Synthetic oligonucleotide
  Sense strand starting at position 2948 of SEQ ID NO: 1889047
aaggaagaguccgcacuua

SEQ ID NO: 2575699 - RNA, 19 nt, Artificial Sequence
  Description of Artificial Sequence: Synthetic oligonucleotide
  Antisense strand to SEQ ID NO: 2575698
uaagugcggacucuuccuu

SEQ ID NO: 2575700 - RNA, 19 nt, Artificial Sequence
  Description of Artificial Sequence: Synthetic oligonucleotide
  Sense strand starting at position 2976 of SEQ ID NO: 1889047
aguuguccuaguuggaaca

SEQ ID NO: 2575701 - RNA, 19 nt, Artificial Sequence
  Description of Artificial Sequence: Synthetic oligonucleotide
  Antisense strand to SEQ ID NO: 2575700
uguuccaacuaggacaacu

SEQ ID NO: 2575702 - RNA, 19 nt, Artificial Sequence
  Description of Artificial Sequence: Synthetic oligonucleotide
  Sense strand starting at position 2978 of SEQ ID NO: 1889047
uuguccuaguuggaacauu

SEQ ID NO: 2575703 - RNA, 19 nt, Artificial Sequence
  Description of Artificial Sequence: Synthetic oligonucleotide
  Antisense strand to SEQ ID NO: 2575702
aauguuccaacuaggacaa

SEQ ID NO: 2575704 - RNA, 19 nt, Artificial Sequence
  Description of Artificial Sequence: Synthetic oligonucleotide
  Sense strand starting at position 3312 of SEQ ID NO: 1889047
ccaggcaaguugucuugaa

SEQ ID NO: 2575705 - RNA, 19 nt, Artificial Sequence
  Description of Artificial Sequence: Synthetic oligonucleotide
  Antisense strand to SEQ ID NO: 2575704
uucaagacaacuugccugg

SEQ ID NO: 2575706 - RNA, 19 nt, Artificial Sequence
  Description of Artificial Sequence: Synthetic oligonucleotide
  Sense strand starting at position 3313 of SEQ ID NO: 1889047
caggcaaguugucuugaaa

SEQ ID NO: 2575707 - RNA, 19 nt, Artificial Sequence
  Description of Artificial Sequence: Synthetic oligonucleotide
  Antisense strand to SEQ ID NO: 2575706
uuucaagacaacuugccug

SEQ ID NO: 2575708 - RNA, 19 nt, Artificial Sequence
  Description of Artificial Sequence: Synthetic oligonucleotide
  Sense strand starting at position 3342 of SEQ ID NO: 1889047
auccgaauuucucuuguuu

SEQ ID NO: 2575709 - RNA, 19 nt, Artificial Sequence
  Description of Artificial Sequence: Synthetic oligonucleotide
  Antisense strand to SEQ ID NO: 2575708
aaacaagagaaauucggau

SEQ ID NO: 2575710 - RNA, 19 nt, Artificial Sequence
  Description of Artificial Sequence: Synthetic oligonucleotide
  Sense strand starting at position 3693 of SEQ ID NO: 1889047
cucugucucccaggauaaa

SEQ ID NO: 2575711 - RNA, 19 nt, Artificial Sequence
  Description of Artificial Sequence: Synthetic oligonucleotide
  Antisense strand to SEQ ID NO: 2575710
uuuauccugggagacagag

SEQ ID NO: 2575712 - RNA, 19 nt, Artificial Sequence
  Description of Artificial Sequence: Synthetic oligonucleotide
  Sense strand starting at position 3782 of SEQ ID NO: 1889047
ccauauuggccacacugau

SEQ ID NO: 2575713 - RNA, 19 nt, Artificial Sequence
  Description of Artificial Sequence: Synthetic oligonucleotide
  Antisense strand to SEQ ID NO: 2575712
aucaguguggccaauaugg

SEQ ID NO: 2575714 - RNA, 19 nt, Artificial Sequence
  Description of Artificial Sequence: Synthetic oligonucleotide
  Sense strand starting at position 3829 of SEQ ID NO: 1889047
gccucaagugcuggaaauu

SEQ ID NO: 2575715 - RNA, 19 nt, Artificial Sequence
  Description of Artificial Sequence: Synthetic oligonucleotide
  Antisense strand to SEQ ID NO: 2575714
aauuuccagcacuugaggc

SEQ ID NO: 2575716 - RNA, 19 nt, Artificial Sequence
  Description of Artificial Sequence: Synthetic oligonucleotide
  Sense strand starting at position 3830 of SEQ ID NO: 1889047
ccucaagugcuggaaauua

SEQ ID NO: 2575717 - RNA, 19 nt, Artificial Sequence
  Description of Artificial Sequence: Synthetic oligonucleotide
  Antisense strand to SEQ ID NO: 2575716
uaauuuccagcacuugagg

SEQ ID NO: 2575718 - RNA, 19 nt, Artificial Sequence
  Description of Artificial Sequence: Synthetic oligonucleotide
  Sense strand starting at position 3915 of SEQ ID NO: 1889047
aauacaguguuguccuagu

SEQ ID NO: 2575719 - RNA, 19 nt, Artificial Sequence
  Description of Artificial Sequence: Synthetic oligonucleotide
  Antisense strand to SEQ ID NO: 2575718
acuaggacaacacuguauu

SEQ ID NO: 2575720 - RNA, 19 nt, Artificial Sequence
  Description of Artificial Sequence: Synthetic oligonucleotide
  Sense strand starting at position 3928 of SEQ ID NO: 1889047
ccuaguauuggugaugcua

SEQ ID NO: 2575721 - RNA, 19 nt, Artificial Sequence
  Description of Artificial Sequence: Synthetic oligonucleotide
  Antisense strand to SEQ ID NO: 2575720
uagcaucaccaauacuagg

SEQ ID NO: 2575722 - RNA, 19 nt, Artificial Sequence
  Description of Artificial Sequence: Synthetic oligonucleotide
  Sense strand starting at position 3930 of SEQ ID NO: 1889047
uaguauuggugaugcuaaa

SEQ ID NO: 2575723 - RNA, 19 nt, Artificial Sequence
  Description of Artificial Sequence: Synthetic oligonucleotide
  Antisense strand to SEQ ID NO: 2575722
uuuagcaucaccaauacua

SEQ ID NO: 2575724 - RNA, 19 nt, Artificial Sequence
  Description of Artificial Sequence: Synthetic oligonucleotide
  Sense strand starting at position 218 of SEQ ID NO: 1889048
agcuccuaguuuccagaga

SEQ ID NO: 2575725 - RNA, 19 nt, Artificial Sequence
  Description of Artificial Sequence: Synthetic oligonucleotide
  Antisense strand to SEQ ID NO: 2575724
ucucuggaaacuaggagcu

SEQ ID NO: 2575726 - RNA, 19 nt, Artificial Sequence
  Description of Artificial Sequence: Synthetic oligonucleotide
  Sense strand starting at position 219 of SEQ ID NO: 1889048
gcuccuaguuuccagagau

SEQ ID NO: 2575727 - RNA, 19 nt, Artificial Sequence
  Description of Artificial Sequence: Synthetic oligonucleotide
  Antisense strand to SEQ ID NO: 2575726
aucucuggaaacuaggagc

SEQ ID NO: 2575728 - RNA, 19 nt, Artificial Sequence
  Description of Artificial Sequence: Synthetic oligonucleotide
  Sense strand starting at position 320 of SEQ ID NO: 1889048
gaaucuggaguaugucaca

SEQ ID NO: 2575729 - RNA, 19 nt, Artificial Sequence
  Description of Artificial Sequence: Synthetic oligonucleotide
  Antisense strand to SEQ ID NO: 2575728
ugugacauacuccagauuc

SEQ ID NO: 2575730 - RNA, 19 nt, Artificial Sequence
  Description of Artificial Sequence: Synthetic oligonucleotide
  Sense strand starting at position 323 of SEQ ID NO: 1889048
ucuggaguaugucacagaa

SEQ ID NO: 2575731 - RNA, 19 nt, Artificial Sequence
  Description of Artificial Sequence: Synthetic oligonucleotide
  Antisense strand to SEQ ID NO: 2575730
uucugugacauacuccaga

SEQ ID NO: 2575732 - RNA, 19 nt, Artificial Sequence
  Description of Artificial Sequence: Synthetic oligonucleotide
  Sense strand starting at position 325 of SEQ ID NO: 1889048
uggaguaugucacagaauu

SEQ ID NO: 2575733 - RNA, 19 nt, Artificial Sequence
  Description of Artificial Sequence: Synthetic oligonucleotide
  Antisense strand to SEQ ID NO: 2575732
aauucugugacauacucca

SEQ ID NO: 2575734 - RNA, 19 nt, Artificial Sequence
  Description of Artificial Sequence: Synthetic oligonucleotide
  Sense strand starting at position 523 of SEQ ID NO: 1889048
ugcagagcuauuugacagu

SEQ ID NO: 2575735 - RNA, 19 nt, Artificial Sequence
  Description of Artificial Sequence: Synthetic oligonucleotide
  Antisense strand to SEQ ID NO: 2575734
acugucaaauagcucugca

SEQ ID NO: 2575736 - RNA, 19 nt, Artificial Sequence
  Description of Artificial Sequence: Synthetic oligonucleotide
  Sense strand starting at position 529 of SEQ ID NO: 1889048
gcuauuugacagugucuga

SEQ ID NO: 2575737 - RNA, 19 nt, Artificial Sequence
  Description of Artificial Sequence: Synthetic oligonucleotide
  Antisense strand to SEQ ID NO: 2575736
ucagacacugucaaauagc

SEQ ID NO: 2575738 - RNA, 19 nt, Artificial Sequence
  Description of Artificial Sequence: Synthetic oligonucleotide
  Sense strand starting at position 533 of SEQ ID NO: 1889048
uuugacagugucugagaaa

SEQ ID NO: 2575739 - RNA, 19 nt, Artificial Sequence
  Description of Artificial Sequence: Synthetic oligonucleotide
  Antisense strand to SEQ ID NO: 2575738
uuucucagacacugucaaa

SEQ ID NO: 2575740 - RNA, 19 nt, Artificial Sequence
  Description of Artificial Sequence: Synthetic oligonucleotide
  Sense strand starting at position 630 of SEQ ID NO: 1889048
gagcguguuugcuuggaga

SEQ ID NO: 2575741 - RNA, 19 nt, Artificial Sequence
  Description of Artificial Sequence: Synthetic oligonucleotide
  Antisense strand to SEQ ID NO: 2575740
ucuccaagcaaacacgcuc

SEQ ID NO: 2575742 - RNA, 19 nt, Artificial Sequence
  Description of Artificial Sequence: Synthetic oligonucleotide
  Sense strand starting at position 632 of SEQ ID NO: 1889048
gcguguuugcuuggagaca

SEQ ID NO: 2575743 - RNA, 19 nt, Artificial Sequence
  Description of Artificial Sequence: Synthetic oligonucleotide
  Antisense strand to SEQ ID NO: 2575742
ugucuccaagcaaacacgc

SEQ ID NO: 2575744 - RNA, 19 nt, Artificial Sequence
  Description of Artificial Sequence: Synthetic oligonucleotide
  Sense strand starting at position 633 of SEQ ID NO: 1889048
cguguuugcuuggagacau

SEQ ID NO: 2575745 - RNA, 19 nt, Artificial Sequence
  Description of Artificial Sequence: Synthetic oligonucleotide
  Antisense strand to SEQ ID NO: 2575744
augucuccaagcaaacacg

SEQ ID NO: 2575746 - RNA, 19 nt, Artificial Sequence
  Description of Artificial Sequence: Synthetic oligonucleotide
  Sense strand starting at position 653 of SEQ ID NO: 1889048
ccaaucagaucacgugagu

SEQ ID NO: 2575747 - RNA, 19 nt, Artificial Sequence
  Description of Artificial Sequence: Synthetic oligonucleotide
  Antisense strand to SEQ ID NO: 2575746
acucacgugaucugauugg

SEQ ID NO: 2575748 - RNA, 19 nt, Artificial Sequence
  Description of Artificial Sequence: Synthetic oligonucleotide
  Sense strand starting at position 693 of SEQ ID NO: 1889048
gaguuagcucacgccugua

SEQ ID NO: 2575749 - RNA, 19 nt, Artificial Sequence
  Description of Artificial Sequence: Synthetic oligonucleotide
  Antisense strand to SEQ ID NO: 2575748
uacaggcgugagcuaacuc

SEQ ID NO: 2575750 - RNA, 19 nt, Artificial Sequence
  Description of Artificial Sequence: Synthetic oligonucleotide
  Sense strand starting at position 833 of SEQ ID NO: 1889048
cgccuauugucccagcuau

SEQ ID NO: 2575751 - RNA, 19 nt, Artificial Sequence
  Description of Artificial Sequence: Synthetic oligonucleotide
  Antisense strand to SEQ ID NO: 2575750
auagcugggacaauaggcg

SEQ ID NO: 2575752 - RNA, 19 nt, Artificial Sequence
  Description of Artificial Sequence: Synthetic oligonucleotide
  Sense strand starting at position 2016 of SEQ ID NO: 1889048
uaaagaauguuguuagagg

SEQ ID NO: 2575753 - RNA, 19 nt, Artificial Sequence
  Description of Artificial Sequence: Synthetic oligonucleotide
  Antisense strand to SEQ ID NO: 2575752
ccucuaacaacauucuuua

SEQ ID NO: 2575754 - RNA, 19 nt, Artificial Sequence
  Description of Artificial Sequence: Synthetic oligonucleotide
  Sense strand starting at position 2366 of SEQ ID NO: 1889048
uagggaugggagugauucu

SEQ ID NO: 2575755 - RNA, 19 nt, Artificial Sequence
  Description of Artificial Sequence: Synthetic oligonucleotide
  Antisense strand to SEQ ID NO: 2575754
agaaucacucccaucccua

SEQ ID NO: 2575756 - RNA, 19 nt, Artificial Sequence
  Description of Artificial Sequence: Synthetic oligonucleotide
  Sense strand starting at position 2375 of SEQ ID NO: 1889048
gagugauucucuuugccuu

SEQ ID NO: 2575757 - RNA, 19 nt, Artificial Sequence
  Description of Artificial Sequence: Synthetic oligonucleotide
  Antisense strand to SEQ ID NO: 2575756
aaggcaaagagaaucacuc

SEQ ID NO: 2575758 - RNA, 19 nt, Artificial Sequence
  Description of Artificial Sequence: Synthetic oligonucleotide
  Sense strand starting at position 2376 of SEQ ID NO: 1889048
agugauucucuuugccuuu

SEQ ID NO: 2575759 - RNA, 19 nt, Artificial Sequence
  Description of Artificial Sequence: Synthetic oligonucleotide
  Antisense strand to SEQ ID NO: 2575758
aaaggcaaagagaaucacu

SEQ ID NO: 2575760 - RNA, 19 nt, Artificial Sequence
  Description of Artificial Sequence: Synthetic oligonucleotide
  Sense strand starting at position 2403 of SEQ ID NO: 1889048
uuggcagacauguguaaca

SEQ ID NO: 2575761 - RNA, 19 nt, Artificial Sequence
  Description of Artificial Sequence: Synthetic oligonucleotide
  Antisense strand to SEQ ID NO: 2575760
uguuacacaugucugccaa

SEQ ID NO: 2575762 - RNA, 19 nt, Artificial Sequence
  Description of Artificial Sequence: Synthetic oligonucleotide
  Sense strand starting at position 2405 of SEQ ID NO: 1889048
ggcagacauguguaacaac

SEQ ID NO: 2575763 - RNA, 19 nt, Artificial Sequence
  Description of Artificial Sequence: Synthetic oligonucleotide
  Antisense strand to SEQ ID NO: 2575762
guuguuacacaugucugcc

SEQ ID NO: 2575764 - RNA, 19 nt, Artificial Sequence
  Description of Artificial Sequence: Synthetic oligonucleotide
  Sense strand starting at position 2408 of SEQ ID NO: 1889048
agacauguguaacaacaaa

SEQ ID NO: 2575765 - RNA, 19 nt, Artificial Sequence
  Description of Artificial Sequence: Synthetic oligonucleotide
  Antisense strand to SEQ ID NO: 2575764
uuuguuguuacacaugucu

SEQ ID NO: 2575766 - RNA, 19 nt, Artificial Sequence
  Description of Artificial Sequence: Synthetic oligonucleotide
  Sense strand starting at position 2427 of SEQ ID NO: 1889048
auggucuguuaucaacauu

SEQ ID NO: 2575767 - RNA, 19 nt, Artificial Sequence
  Description of Artificial Sequence: Synthetic oligonucleotide
  Antisense strand to SEQ ID NO: 2575766
aauguugauaacagaccau

SEQ ID NO: 2575768 - RNA, 19 nt, Artificial Sequence
  Description of Artificial Sequence: Synthetic oligonucleotide
  Sense strand starting at position 2666 of SEQ ID NO: 1889048
ccugcucagugagaaacaa

SEQ ID NO: 2575769 - RNA, 19 nt, Artificial Sequence
  Description of Artificial Sequence: Synthetic oligonucleotide
  Antisense strand to SEQ ID NO: 2575768
uuguuucucacugagcagg

SEQ ID NO: 2575770 - RNA, 19 nt, Artificial Sequence
  Description of Artificial Sequence: Synthetic oligonucleotide
  Sense strand starting at position 2789 of SEQ ID NO: 1889048
aggcuucuucugucgcauu

SEQ ID NO: 2575771 - RNA, 19 nt, Artificial Sequence
  Description of Artificial Sequence: Synthetic oligonucleotide
  Antisense strand to SEQ ID NO: 2575770
aaugcgacagaagaagccu

SEQ ID NO: 2575772 - RNA, 19 nt, Artificial Sequence
  Description of Artificial Sequence: Synthetic oligonucleotide
  Sense strand starting at position 2799 of SEQ ID NO: 1889048
ugucgcauucugccuauga

SEQ ID NO: 2575773 - RNA, 19 nt, Artificial Sequence
  Description of Artificial Sequence: Synthetic oligonucleotide
  Antisense strand to SEQ ID NO: 2575772
ucauaggcagaaugcgaca

SEQ ID NO: 2575774 - RNA, 19 nt, Artificial Sequence
  Description of Artificial Sequence: Synthetic oligonucleotide
  Sense strand starting at position 2800 of SEQ ID NO: 1889048
gucgcauucugccuaugaa

SEQ ID NO: 2575775 - RNA, 19 nt, Artificial Sequence
  Description of Artificial Sequence: Synthetic oligonucleotide
  Antisense strand to SEQ ID NO: 2575774
uucauaggcagaaugcgac

SEQ ID NO: 2575776 - RNA, 19 nt, Artificial Sequence
  Description of Artificial Sequence: Synthetic oligonucleotide
  Sense strand starting at position 2801 of SEQ ID NO: 1889048
ucgcauucugccuaugaaa

SEQ ID NO: 2575777 - RNA, 19 nt, Artificial Sequence
  Description of Artificial Sequence: Synthetic oligonucleotide
  Antisense strand to SEQ ID NO: 2575776
uuucauaggcagaaugcga

SEQ ID NO: 2575778 - RNA, 19 nt, Artificial Sequence
  Description of Artificial Sequence: Synthetic oligonucleotide
  Sense strand starting at position 3270 of SEQ ID NO: 1889048
aaaugaaguucguuguaga

SEQ ID NO: 2575779 - RNA, 19 nt, Artificial Sequence
  Description of Artificial Sequence: Synthetic oligonucleotide
  Antisense strand to SEQ ID NO: 2575778
ucuacaacgaacuucauuu

SEQ ID NO: 2575780 - RNA, 19 nt, Artificial Sequence
  Description of Artificial Sequence: Synthetic oligonucleotide
  Sense strand starting at position 3271 of SEQ ID NO: 1889048
aaugaaguucguuguagau

SEQ ID NO: 2575781 - RNA, 19 nt, Artificial Sequence
  Description of Artificial Sequence: Synthetic oligonucleotide
  Antisense strand to SEQ ID NO: 2575780
aucuacaacgaacuucauu

SEQ ID NO: 2575782 - RNA, 19 nt, Artificial Sequence
  Description of Artificial Sequence: Synthetic oligonucleotide
  Sense strand starting at position 3281 of SEQ ID NO: 1889048
guuguagaugcauggauuu

SEQ ID NO: 2575783 - RNA, 19 nt, Artificial Sequence
  Description of Artificial Sequence: Synthetic oligonucleotide
  Antisense strand to SEQ ID NO: 2575782
aaauccaugcaucuacaac

SEQ ID NO: 2575784 - RNA, 19 nt, Artificial Sequence
  Description of Artificial Sequence: Synthetic oligonucleotide
  Sense strand starting at position 3348 of SEQ ID NO: 1889048
augccaguacuauguaguu

SEQ ID NO: 2575785 - RNA, 19 nt, Artificial Sequence
  Description of Artificial Sequence: Synthetic oligonucleotide
  Antisense strand to SEQ ID NO: 2575784
aacuacauaguacuggcau

SEQ ID NO: 2575786 - RNA, 19 nt, Artificial Sequence
  Description of Artificial Sequence: Synthetic oligonucleotide
  Sense strand starting at position 3628 of SEQ ID NO: 1889048
ugacaugauuucugucuuu

SEQ ID NO: 2575787 - RNA, 19 nt, Artificial Sequence
  Description of Artificial Sequence: Synthetic oligonucleotide
  Antisense strand to SEQ ID NO: 2575786
aaagacagaaaucauguca

SEQ ID NO: 2575788 - RNA, 19 nt, Artificial Sequence
  Description of Artificial Sequence: Synthetic oligonucleotide
  Sense strand starting at position 3703 of SEQ ID NO: 1889048
uuuguauucuuacaguucu

SEQ ID NO: 2575789 - RNA, 19 nt, Artificial Sequence
  Description of Artificial Sequence: Synthetic oligonucleotide
  Antisense strand to SEQ ID NO: 2575788
agaacuguaagaauacaaa

SEQ ID NO: 2575790 - RNA, 19 nt, Artificial Sequence
  Description of Artificial Sequence: Synthetic oligonucleotide
  Sense strand starting at position 3775 of SEQ ID NO: 1889048
gcugccuccucugaaggaa

SEQ ID NO: 2575791 - RNA, 19 nt, Artificial Sequence
  Description of Artificial Sequence: Synthetic oligonucleotide
  Antisense strand to SEQ ID NO: 2575790
uuccuucagaggaggcagc

SEQ ID NO: 2575792 - RNA, 19 nt, Artificial Sequence
  Description of Artificial Sequence: Synthetic oligonucleotide
  Sense strand starting at position 3795 of SEQ ID NO: 1889048
auaauucuguguccucaca

SEQ ID NO: 2575793 - RNA, 19 nt, Artificial Sequence
  Description of Artificial Sequence: Synthetic oligonucleotide
  Antisense strand to SEQ ID NO: 2575792
ugugaggacacagaauuau

SEQ ID NO: 2575794 - RNA, 19 nt, Artificial Sequence
  Description of Artificial Sequence: Synthetic oligonucleotide
  Sense strand starting at position 3835 of SEQ ID NO: 1889048
caaacugaaugcucuguga

SEQ ID NO: 2575795 - RNA, 19 nt, Artificial Sequence
  Description of Artificial Sequence: Synthetic oligonucleotide
  Antisense strand to SEQ ID NO: 2575794
ucacagagcauucaguuug

SEQ ID NO: 2575796 - RNA, 19 nt, Artificial Sequence
  Description of Artificial Sequence: Synthetic oligonucleotide
  Sense strand starting at position 3837 of SEQ ID NO: 1889048
aacugaaugcucugugaag

SEQ ID NO: 2575797 - RNA, 19 nt, Artificial Sequence
  Description of Artificial Sequence: Synthetic oligonucleotide
  Antisense strand to SEQ ID NO: 2575796
cuucacagagcauucaguu

SEQ ID NO: 2575798 - RNA, 19 nt, Artificial Sequence
  Description of Artificial Sequence: Synthetic oligonucleotide
  Sense strand starting at position 466 of SEQ ID NO: 1889049
acccuuaggccagaucauu

SEQ ID NO: 2575799 - RNA, 19 nt, Artificial Sequence
  Description of Artificial Sequence: Synthetic oligonucleotide
  Antisense strand to SEQ ID NO: 2575798
aaugaucuggccuaagggu

SEQ ID NO: 2575800 - RNA, 19 nt, Artificial Sequence
  Description of Artificial Sequence: Synthetic oligonucleotide
  Sense strand starting at position 754 of SEQ ID NO: 1889049
ccaugaacucuaggacagu

SEQ ID NO: 2575801 - RNA, 19 nt, Artificial Sequence
  Description of Artificial Sequence: Synthetic oligonucleotide
  Antisense strand to SEQ ID NO: 2575800
acuguccuagaguucaugg

SEQ ID NO: 2575802 - RNA, 19 nt, Artificial Sequence
  Description of Artificial Sequence: Synthetic oligonucleotide
  Sense strand starting at position 755 of SEQ ID NO: 1889049
caugaacucuaggacaguu

SEQ ID NO: 2575803 - RNA, 19 nt, Artificial Sequence
  Description of Artificial Sequence: Synthetic oligonucleotide
  Antisense strand to SEQ ID NO: 2575802
aacuguccuagaguucaug

SEQ ID NO: 2575804 - RNA, 19 nt, Artificial Sequence
  Description of Artificial Sequence: Synthetic oligonucleotide
  Sense strand starting at position 817 of SEQ ID NO: 1889049
cggccaucugguuaccaga

SEQ ID NO: 2575805 - RNA, 19 nt, Artificial Sequence
  Description of Artificial Sequence: Synthetic oligonucleotide
  Antisense strand to SEQ ID NO: 2575804
ucugguaaccagauggccg

SEQ ID NO: 2575806 - RNA, 19 nt, Artificial Sequence
  Description of Artificial Sequence: Synthetic oligonucleotide
  Sense strand starting at position 840 of SEQ ID NO: 1889049
agcaacuuccugugaaguc

SEQ ID NO: 2575807 - RNA, 19 nt, Artificial Sequence
  Description of Artificial Sequence: Synthetic oligonucleotide
  Antisense strand to SEQ ID NO: 2575806
gacuucacaggaaguugcu

SEQ ID NO: 2575808 - RNA, 19 nt, Artificial Sequence
  Description of Artificial Sequence: Synthetic oligonucleotide
  Sense strand starting at position 841 of SEQ ID NO: 1889049
gcaacuuccugugaaguca

SEQ ID NO: 2575809 - RNA, 19 nt, Artificial Sequence
  Description of Artificial Sequence: Synthetic oligonucleotide
  Antisense strand to SEQ ID NO: 2575808
ugacuucacaggaaguugc

SEQ ID NO: 2575810 - RNA, 19 nt, Artificial Sequence
  Description of Artificial Sequence: Synthetic oligonucleotide
  Sense strand starting at position 973 of SEQ ID NO: 1889049
agaacuuccucacaggaua

SEQ ID NO: 2575811 - RNA, 19 nt, Artificial Sequence
  Description of Artificial Sequence: Synthetic oligonucleotide
  Antisense strand to SEQ ID NO: 2575810
uauccugugaggaaguucu

SEQ ID NO: 2575812 - RNA, 19 nt, Artificial Sequence
  Description of Artificial Sequence: Synthetic oligonucleotide
  Sense strand starting at position 986 of SEQ ID NO: 1889049
aggauauccuauguccaac

SEQ ID NO: 2575813 - RNA, 19 nt, Artificial Sequence
  Description of Artificial Sequence: Synthetic oligonucleotide
  Antisense strand to SEQ ID NO: 2575812
guuggacauaggauauccu

SEQ ID NO: 2575814 - RNA, 19 nt, Artificial Sequence
  Description of Artificial Sequence: Synthetic oligonucleotide
  Sense strand starting at position 1034 of SEQ ID NO: 1889049
cuggaugguuuagagaaca

SEQ ID NO: 2575815 - RNA, 19 nt, Artificial Sequence
  Description of Artificial Sequence: Synthetic oligonucleotide
  Antisense strand to SEQ ID NO: 2575814
uguucucuaaaccauccag

SEQ ID NO: 2575816 - RNA, 19 nt, Artificial Sequence
  Description of Artificial Sequence: Synthetic oligonucleotide
  Sense strand starting at position 1072 of SEQ ID NO: 1889049
cguuaaaggagcuguaaga

SEQ ID NO: 2575817 - RNA, 19 nt, Artificial Sequence
  Description of Artificial Sequence: Synthetic oligonucleotide
  Antisense strand to SEQ ID NO: 2575816
ucuuacagcuccuuuaacg

SEQ ID NO: 2575818 - RNA, 19 nt, Artificial Sequence
  Description of Artificial Sequence: Synthetic oligonucleotide
  Sense strand starting at position 1219 of SEQ ID NO: 1889049
gugccagggcuccaugaaa

SEQ ID NO: 2575819 - RNA, 19 nt, Artificial Sequence
  Description of Artificial Sequence: Synthetic oligonucleotide
  Antisense strand to SEQ ID NO: 2575818
uuucauggagcccuggcac

SEQ ID NO: 2575820 - RNA, 19 nt, Artificial Sequence
  Description of Artificial Sequence: Synthetic oligonucleotide
  Sense strand starting at position 2400 of SEQ ID NO: 1889049
guuacaguacuacaugaua

SEQ ID NO: 2575821 - RNA, 19 nt, Artificial Sequence
  Description of Artificial Sequence: Synthetic oligonucleotide
  Antisense strand to SEQ ID NO: 2575820
uaucauguaguacuguaac

SEQ ID NO: 2575822 - RNA, 19 nt, Artificial Sequence
  Description of Artificial Sequence: Synthetic oligonucleotide
  Sense strand starting at position 2411 of SEQ ID NO: 1889049
acaugauacuauguguaug

SEQ ID NO: 2575823 - RNA, 19 nt, Artificial Sequence
  Description of Artificial Sequence: Synthetic oligonucleotide
  Antisense strand to SEQ ID NO: 2575822
cauacacauaguaucaugu

SEQ ID NO: 2575824 - RNA, 19 nt, Artificial Sequence
  Description of Artificial Sequence: Synthetic oligonucleotide
  Sense strand starting at position 2413 of SEQ ID NO: 1889049
augauacuauguguaugua

SEQ ID NO: 2575825 - RNA, 19 nt, Artificial Sequence
  Description of Artificial Sequence: Synthetic oligonucleotide
  Antisense strand to SEQ ID NO: 2575824
uacauacacauaguaucau

SEQ ID NO: 2575826 - RNA, 19 nt, Artificial Sequence
  Description of Artificial Sequence: Synthetic oligonucleotide
  Sense strand starting at position 2421 of SEQ ID NO: 1889049
auguguauguagcaaugua

SEQ ID NO: 2575827 - RNA, 19 nt, Artificial Sequence
  Description of Artificial Sequence: Synthetic oligonucleotide
  Antisense strand to SEQ ID NO: 2575826
uacauugcuacauacacau

SEQ ID NO: 2575828 - RNA, 19 nt, Artificial Sequence
  Description of Artificial Sequence: Synthetic oligonucleotide
  Sense strand starting at position 2428 of SEQ ID NO: 1889049
uguagcaauguauaaucua

SEQ ID NO: 2575829 - RNA, 19 nt, Artificial Sequence
  Description of Artificial Sequence: Synthetic oligonucleotide
  Antisense strand to SEQ ID NO: 2575828
uagauuauacauugcuaca

SEQ ID NO: 2575830 - RNA, 19 nt, Artificial Sequence
  Description of Artificial Sequence: Synthetic oligonucleotide
  Sense strand starting at position 2484 of SEQ ID NO: 1889049
acaaacauauuguguauca

SEQ ID NO: 2575831 - RNA, 19 nt, Artificial Sequence
  Description of Artificial Sequence: Synthetic oligonucleotide
  Antisense strand to SEQ ID NO: 2575830
ugauacacaauauguuugu

SEQ ID NO: 2575832 - RNA, 19 nt, Artificial Sequence
  Description of Artificial Sequence: Synthetic oligonucleotide
  Sense strand starting at position 2494 of SEQ ID NO: 1889049
uguguaucauauguaauac

SEQ ID NO: 2575833 - RNA, 19 nt, Artificial Sequence
  Description of Artificial Sequence: Synthetic oligonucleotide
  Antisense strand to SEQ ID NO: 2575832
guauuacauaugauacaca

SEQ ID NO: 2575834 - RNA, 19 nt, Artificial Sequence
  Description of Artificial Sequence: Synthetic oligonucleotide
  Sense strand starting at position 2543 of SEQ ID NO: 1889049
gucacaaugucagcuacua

SEQ ID NO: 2575835 - RNA, 19 nt, Artificial Sequence
  Description of Artificial Sequence: Synthetic oligonucleotide
  Antisense strand to SEQ ID NO: 2575834
uaguagcugacauugugac

SEQ ID NO: 2575836 - RNA, 19 nt, Artificial Sequence
  Description of Artificial Sequence: Synthetic oligonucleotide
  Sense strand starting at position 3616 of SEQ ID NO: 1889049
cuucuauuaccacgucgaa

SEQ ID NO: 2575837 - RNA, 19 nt, Artificial Sequence
  Description of Artificial Sequence: Synthetic oligonucleotide
  Antisense strand to SEQ ID NO: 2575836
uucgacgugguaauagaag

SEQ ID NO: 2575838 - RNA, 19 nt, Artificial Sequence
  Description of Artificial Sequence: Synthetic oligonucleotide
  Sense strand starting at position 3628 of SEQ ID NO: 1889049
cgucgaauccauuagcuac

SEQ ID NO: 2575839 - RNA, 19 nt, Artificial Sequence
  Description of Artificial Sequence: Synthetic oligonucleotide
  Antisense strand to SEQ ID NO: 2575838
guagcuaauggauucgacg

SEQ ID NO: 2575840 - RNA, 19 nt, Artificial Sequence
  Description of Artificial Sequence: Synthetic oligonucleotide
  Sense strand starting at position 3645 of SEQ ID NO: 1889049
acagccaucccaugagaag

SEQ ID NO: 2575841 - RNA, 19 nt, Artificial Sequence
  Description of Artificial Sequence: Synthetic oligonucleotide
  Antisense strand to SEQ ID NO: 2575840
cuucucaugggauggcugu

SEQ ID NO: 2575842 - RNA, 19 nt, Artificial Sequence
  Description of Artificial Sequence: Synthetic oligonucleotide
  Sense strand starting at position 3656 of SEQ ID NO: 1889049
augagaagcugaguggauu

SEQ ID NO: 2575843 - RNA, 19 nt, Artificial Sequence
  Description of Artificial Sequence: Synthetic oligonucleotide
  Antisense strand to SEQ ID NO: 2575842
aauccacucagcuucucau

SEQ ID NO: 2575844 - RNA, 19 nt, Artificial Sequence
  Description of Artificial Sequence: Synthetic oligonucleotide
  Sense strand starting at position 3826 of SEQ ID NO: 1889049
gccagaucauguguggacu

SEQ ID NO: 2575845 - RNA, 19 nt, Artificial Sequence
  Description of Artificial Sequence: Synthetic oligonucleotide
  Antisense strand to SEQ ID NO: 2575844
aguccacacaugaucuggc

SEQ ID NO: 2575846 - RNA, 19 nt, Artificial Sequence
  Description of Artificial Sequence: Synthetic oligonucleotide
  Sense strand starting at position 2166 of SEQ ID NO: 1889050
gcgagaugagcugacugua

SEQ ID NO: 2575847 - RNA, 19 nt, Artificial Sequence
  Description of Artificial Sequence: Synthetic oligonucleotide
  Antisense strand to SEQ ID NO: 2575846
uacagucagcucaucucgc

SEQ ID NO: 2575848 - RNA, 19 nt, Artificial Sequence
  Description of Artificial Sequence: Synthetic oligonucleotide
  Sense strand starting at position 2208 of SEQ ID NO: 1889050
ccaggcagauuaucagaau

SEQ ID NO: 2575849 - RNA, 19 nt, Artificial Sequence
  Description of Artificial Sequence: Synthetic oligonucleotide
  Antisense strand to SEQ ID NO: 2575848
auucugauaaucugccugg

SEQ ID NO: 2575850 - RNA, 19 nt, Artificial Sequence
  Description of Artificial Sequence: Synthetic oligonucleotide
  Sense strand starting at position 2214 of SEQ ID NO: 1889050
agauuaucagaaugcagcu

SEQ ID NO: 2575851 - RNA, 19 nt, Artificial Sequence
  Description of Artificial Sequence: Synthetic oligonucleotide
  Antisense strand to SEQ ID NO: 2575850
agcugcauucugauaaucu

SEQ ID NO: 2575852 - RNA, 19 nt, Artificial Sequence
  Description of Artificial Sequence: Synthetic oligonucleotide
  Sense strand starting at position 2311 of SEQ ID NO: 1889050
cagggcuuauuugagaaua

SEQ ID NO: 2575853 - RNA, 19 nt, Artificial Sequence
  Description of Artificial Sequence: Synthetic oligonucleotide
  Antisense strand to SEQ ID NO: 2575852
uauucucaaauaagcccug

SEQ ID NO: 2575854 - RNA, 19 nt, Artificial Sequence
  Description of Artificial Sequence: Synthetic oligonucleotide
  Sense strand starting at position 2313 of SEQ ID NO: 1889050
gggcuuauuugagaauaag

SEQ ID NO: 2575855 - RNA, 19 nt, Artificial Sequence
  Description of Artificial Sequence: Synthetic oligonucleotide
  Antisense strand to SEQ ID NO: 2575854
cuuauucucaaauaagccc

SEQ ID NO: 2575856 - RNA, 19 nt, Artificial Sequence
  Description of Artificial Sequence: Synthetic oligonucleotide
  Sense strand starting at position 2445 of SEQ ID NO: 1889050
uugccaaagagauggauca

SEQ ID NO: 2575857 - RNA, 19 nt, Artificial Sequence
  Description of Artificial Sequence: Synthetic oligonucleotide
  Antisense strand to SEQ ID NO: 2575856
ugauccaucucuuuggcaa

SEQ ID NO: 2575858 - RNA, 19 nt, Artificial Sequence
  Description of Artificial Sequence: Synthetic oligonucleotide
  Sense strand starting at position 2545 of SEQ ID NO: 1889050
gacuguaaaugagaaagaa

SEQ ID NO: 2575859 - RNA, 19 nt, Artificial Sequence
  Description of Artificial Sequence: Synthetic oligonucleotide
  Antisense strand to SEQ ID NO: 2575858
uucuuucucauuuacaguc

SEQ ID NO: 2575860 - RNA, 19 nt, Artificial Sequence
  Description of Artificial Sequence: Synthetic oligonucleotide
  Sense strand starting at position 2715 of SEQ ID NO: 1889050
cucuuugaguacucacacu

SEQ ID NO: 2575861 - RNA, 19 nt, Artificial Sequence
  Description of Artificial Sequence: Synthetic oligonucleotide
  Antisense strand to SEQ ID NO: 2575860
agugugaguacucaaagag

SEQ ID NO: 2575862 - RNA, 19 nt, Artificial Sequence
  Description of Artificial Sequence: Synthetic oligonucleotide
  Sense strand starting at position 2736 of SEQ ID NO: 1889050
uuuaauaggcuuugguaga

SEQ ID NO: 2575863 - RNA, 19 nt, Artificial Sequence
  Description of Artificial Sequence: Synthetic oligonucleotide
  Antisense strand to SEQ ID NO: 2575862
ucuaccaaagccuauuaaa

SEQ ID NO: 2575864 - RNA, 19 nt, Artificial Sequence
  Description of Artificial Sequence: Synthetic oligonucleotide
  Sense strand starting at position 2747 of SEQ ID NO: 1889050
uugguagaguuaccacuaa

SEQ ID NO: 2575865 - RNA, 19 nt, Artificial Sequence
  Description of Artificial Sequence: Synthetic oligonucleotide
  Antisense strand to SEQ ID NO: 2575864
uuagugguaacucuaccaa

SEQ ID NO: 2575866 - RNA, 19 nt, Artificial Sequence
  Description of Artificial Sequence: Synthetic oligonucleotide
  Sense strand starting at position 2845 of SEQ ID NO: 1889050
ggauaauggucuuuggccu

SEQ ID NO: 2575867 - RNA, 19 nt, Artificial Sequence
  Description of Artificial Sequence: Synthetic oligonucleotide
  Antisense strand to SEQ ID NO: 2575866
aggccaaagaccauuaucc

SEQ ID NO: 2575868 - RNA, 19 nt, Artificial Sequence
  Description of Artificial Sequence: Synthetic oligonucleotide
  Sense strand starting at position 2846 of SEQ ID NO: 1889050
gauaauggucuuuggccua

SEQ ID NO: 2575869 - RNA, 19 nt, Artificial Sequence
  Description of Artificial Sequence: Synthetic oligonucleotide
  Antisense strand to SEQ ID NO: 2575868
uaggccaaagaccauuauc

SEQ ID NO: 2575870 - RNA, 19 nt, Artificial Sequence
  Description of Artificial Sequence: Synthetic oligonucleotide
  Sense strand starting at position 2857 of SEQ ID NO: 1889050
uuggccuauucuuugggaa

SEQ ID NO: 2575871 - RNA, 19 nt, Artificial Sequence
  Description of Artificial Sequence: Synthetic oligonucleotide
  Antisense strand to SEQ ID NO: 2575870
uucccaaagaauaggccaa

SEQ ID NO: 2575872 - RNA, 19 nt, Artificial Sequence
  Description of Artificial Sequence: Synthetic oligonucleotide
  Sense strand starting at position 2945 of SEQ ID NO: 1889050
ggaguuugggcugagcuua

SEQ ID NO: 2575873 - RNA, 19 nt, Artificial Sequence
  Description of Artificial Sequence: Synthetic oligonucleotide
  Antisense strand to SEQ ID NO: 2575872
uaagcucagcccaaacucc

SEQ ID NO: 2575874 - RNA, 19 nt, Artificial Sequence
  Description of Artificial Sequence: Synthetic oligonucleotide
  Sense strand starting at position 3040 of SEQ ID NO: 1889050
cuauauuuccugugcuguu

SEQ ID NO: 2575875 - RNA, 19 nt, Artificial Sequence
  Description of Artificial Sequence: Synthetic oligonucleotide
  Antisense strand to SEQ ID NO: 2575874
aacagcacaggaaauauag

SEQ ID NO: 2575876 - RNA, 19 nt, Artificial Sequence
  Description of Artificial Sequence: Synthetic oligonucleotide
  Sense strand starting at position 3054 of SEQ ID NO: 1889050
cuguuucucuacuuggaau

SEQ ID NO: 2575877 - RNA, 19 nt, Artificial Sequence
  Description of Artificial Sequence: Synthetic oligonucleotide
  Antisense strand to SEQ ID NO: 2575876
auuccaaguagagaaacag

SEQ ID NO: 2575878 - RNA, 19 nt, Artificial Sequence
  Description of Artificial Sequence: Synthetic oligonucleotide
  Sense strand starting at position 3056 of SEQ ID NO: 1889050
guuucucuacuuggaauua

SEQ ID NO: 2575879 - RNA, 19 nt, Artificial Sequence
  Description of Artificial Sequence: Synthetic oligonucleotide
  Antisense strand to SEQ ID NO: 2575878
uaauuccaaguagagaaac

SEQ ID NO: 2575880 - RNA, 19 nt, Artificial Sequence
  Description of Artificial Sequence: Synthetic oligonucleotide
  Sense strand starting at position 3084 of SEQ ID NO: 1889050
guuuccuuugccuaugaac

SEQ ID NO: 2575881 - RNA, 19 nt, Artificial Sequence
  Description of Artificial Sequence: Synthetic oligonucleotide
  Antisense strand to SEQ ID NO: 2575880
guucauaggcaaaggaaac

SEQ ID NO: 2575882 - RNA, 19 nt, Artificial Sequence
  Description of Artificial Sequence: Synthetic oligonucleotide
  Sense strand starting at position 3131 of SEQ ID NO: 1889050
aguucucugucuccugaaa

SEQ ID NO: 2575883 - RNA, 19 nt, Artificial Sequence
  Description of Artificial Sequence: Synthetic oligonucleotide
  Antisense strand to SEQ ID NO: 2575882
uuucaggagacagagaacu

SEQ ID NO: 2575884 - RNA, 19 nt, Artificial Sequence
  Description of Artificial Sequence: Synthetic oligonucleotide
  Sense strand starting at position 3156 of SEQ ID NO: 1889050
ccuugacugccucagacua

SEQ ID NO: 2575885 - RNA, 19 nt, Artificial Sequence
  Description of Artificial Sequence: Synthetic oligonucleotide
  Antisense strand to SEQ ID NO: 2575884
uagucugaggcagucaagg

SEQ ID NO: 2575886 - RNA, 19 nt, Artificial Sequence
  Description of Artificial Sequence: Synthetic oligonucleotide
  Sense strand starting at position 3208 of SEQ ID NO: 1889050
acuagcauuuagcuguaua

SEQ ID NO: 2575887 - RNA, 19 nt, Artificial Sequence
  Description of Artificial Sequence: Synthetic oligonucleotide
  Antisense strand to SEQ ID NO: 2575886
uauacagcuaaaugcuagu

SEQ ID NO: 2575888 - RNA, 19 nt, Artificial Sequence
  Description of Artificial Sequence: Synthetic oligonucleotide
  Sense strand starting at position 3293 of SEQ ID NO: 1889050
gcucaauggcaggaaugau

SEQ ID NO: 2575889 - RNA, 19 nt, Artificial Sequence
  Description of Artificial Sequence: Synthetic oligonucleotide
  Antisense strand to SEQ ID NO: 2575888
aucauuccugccauugagc

SEQ ID NO: 2575890 - RNA, 19 nt, Artificial Sequence
  Description of Artificial Sequence: Synthetic oligonucleotide
  Sense strand starting at position 3315 of SEQ ID NO: 1889050
uguuauguugcucauuaaa

SEQ ID NO: 2575891 - RNA, 19 nt, Artificial Sequence
  Description of Artificial Sequence: Synthetic oligonucleotide
  Antisense strand to SEQ ID NO: 2575890
uuuaaugagcaacauaaca

SEQ ID NO: 2575892 - RNA, 19 nt, Artificial Sequence
  Description of Artificial Sequence: Synthetic oligonucleotide
  Sense strand starting at position 3397 of SEQ ID NO: 1889050
aucaucuaaugugucagua

SEQ ID NO: 2575893 - RNA, 19 nt, Artificial Sequence
  Description of Artificial Sequence: Synthetic oligonucleotide
  Antisense strand to SEQ ID NO: 2575892
uacugacacauuagaugau

SEQ ID NO: 2575894 - RNA, 19 nt, Artificial Sequence
  Description of Artificial Sequence: Synthetic oligonucleotide
  Sense strand starting at position 3401 of SEQ ID NO: 1889050
ucuaaugugucaguaagag

SEQ ID NO: 2575895 - RNA, 19 nt, Artificial Sequence
  Description of Artificial Sequence: Synthetic oligonucleotide
  Antisense strand to SEQ ID NO: 2575894
cucuuacugacacauuaga

SEQ ID NO: 2575896 - RNA, 19 nt, Artificial Sequence
  Description of Artificial Sequence: Synthetic oligonucleotide
  Sense strand starting at position 3407 of SEQ ID NO: 1889050
gugucaguaagagaucauu

SEQ ID NO: 2575897 - RNA, 19 nt, Artificial Sequence
  Description of Artificial Sequence: Synthetic oligonucleotide
  Antisense strand to SEQ ID NO: 2575896
aaugaucucuuacugacac

SEQ ID NO: 2575898 - RNA, 19 nt, Artificial Sequence
  Description of Artificial Sequence: Synthetic oligonucleotide
  Sense strand starting at position 3435 of SEQ ID NO: 1889050
ucuguagguagauaggauu

SEQ ID NO: 2575899 - RNA, 19 nt, Artificial Sequence
  Description of Artificial Sequence: Synthetic oligonucleotide
  Antisense strand to SEQ ID NO: 2575898
aauccuaucuaccuacaga

SEQ ID NO: 2575900 - RNA, 19 nt, Artificial Sequence
  Description of Artificial Sequence: Synthetic oligonucleotide
  Sense strand starting at position 3595 of SEQ ID NO: 1889050
augugucuacuuggaggaa

SEQ ID NO: 2575901 - RNA, 19 nt, Artificial Sequence
  Description of Artificial Sequence: Synthetic oligonucleotide
  Antisense strand to SEQ ID NO: 2575900
uuccuccaaguagacacau

SEQ ID NO: 2575902 - RNA, 19 nt, Artificial Sequence
  Description of Artificial Sequence: Synthetic oligonucleotide
  Sense strand starting at position 3608 of SEQ ID NO: 1889050
gaggaagggugauaauuuc

SEQ ID NO: 2575903 - RNA, 19 nt, Artificial Sequence
  Description of Artificial Sequence: Synthetic oligonucleotide
  Antisense strand to SEQ ID NO: 2575902
gaaauuaucacccuuccuc

SEQ ID NO: 2575904 - RNA, 19 nt, Artificial Sequence
  Description of Artificial Sequence: Synthetic oligonucleotide
  Sense strand starting at position 3660 of SEQ ID NO: 1889050
uugguuggauagucaauca

SEQ ID NO: 2575905 - RNA, 19 nt, Artificial Sequence
  Description of Artificial Sequence: Synthetic oligonucleotide
  Antisense strand to SEQ ID NO: 2575904
ugauugacuauccaaccaa

SEQ ID NO: 2575906 - RNA, 19 nt, Artificial Sequence
  Description of Artificial Sequence: Synthetic oligonucleotide
  Sense strand starting at position 3667 of SEQ ID NO: 1889050
gauagucaaucaguuaagu

SEQ ID NO: 2575907 - RNA, 19 nt, Artificial Sequence
  Description of Artificial Sequence: Synthetic oligonucleotide
  Antisense strand to SEQ ID NO: 2575906
acuuaacugauugacuauc

SEQ ID NO: 2575908 - RNA, 19 nt, Artificial Sequence
  Description of Artificial Sequence: Synthetic oligonucleotide
  Sense strand starting at position 3676 of SEQ ID NO: 1889050
ucaguuaagugacugugau

SEQ ID NO: 2575909 - RNA, 19 nt, Artificial Sequence
  Description of Artificial Sequence: Synthetic oligonucleotide
  Antisense strand to SEQ ID NO: 2575908
aucacagucacuuaacuga

SEQ ID NO: 2575910 - RNA, 19 nt, Artificial Sequence
  Description of Artificial Sequence: Synthetic oligonucleotide
  Sense strand starting at position 3677 of SEQ ID NO: 1889050
caguuaagugacugugauu

SEQ ID NO: 2575911 - RNA, 19 nt, Artificial Sequence
  Description of Artificial Sequence: Synthetic oligonucleotide
  Antisense strand to SEQ ID NO: 2575910
aaucacagucacuuaacug

SEQ ID NO: 2575912 - RNA, 19 nt, Artificial Sequence
  Description of Artificial Sequence: Synthetic oligonucleotide
  Sense strand starting at position 3883 of SEQ ID NO: 1889050
aguuuagucccugauauag

SEQ ID NO: 2575913 - RNA, 19 nt, Artificial Sequence
  Description of Artificial Sequence: Synthetic oligonucleotide
  Antisense strand to SEQ ID NO: 2575912
cuauaucagggacuaaacu

SEQ ID NO: 2575914 - RNA, 19 nt, Artificial Sequence
  Description of Artificial Sequence: Synthetic oligonucleotide
  Sense strand starting at position 3891 of SEQ ID NO: 1889050
cccugauauagcuagguga

SEQ ID NO: 2575915 - RNA, 19 nt, Artificial Sequence
  Description of Artificial Sequence: Synthetic oligonucleotide
  Antisense strand to SEQ ID NO: 2575914
ucaccuagcuauaucaggg

SEQ ID NO: 2575916 - RNA, 19 nt, Artificial Sequence
  Description of Artificial Sequence: Synthetic oligonucleotide
  Sense strand starting at position 3893 of SEQ ID NO: 1889050
cugauauagcuaggugacu

SEQ ID NO: 2575917 - RNA, 19 nt, Artificial Sequence
  Description of Artificial Sequence: Synthetic oligonucleotide
  Antisense strand to SEQ ID NO: 2575916
agucaccuagcuauaucag

SEQ ID NO: 2575918 - RNA, 19 nt, Artificial Sequence
  Description of Artificial Sequence: Synthetic oligonucleotide
  Sense strand starting at position 3894 of SEQ ID NO: 1889050
ugauauagcuaggugacua

SEQ ID NO: 2575919 - RNA, 19 nt, Artificial Sequence
  Description of Artificial Sequence: Synthetic oligonucleotide
  Antisense strand to SEQ ID NO: 2575918
uagucaccuagcuauauca

SEQ ID NO: 2575920 - RNA, 19 nt, Artificial Sequence
  Description of Artificial Sequence: Synthetic oligonucleotide
  Sense strand starting at position 3898 of SEQ ID NO: 1889050
auagcuaggugacuaauua

SEQ ID NO: 2575921 - RNA, 19 nt, Artificial Sequence
  Description of Artificial Sequence: Synthetic oligonucleotide
  Antisense strand to SEQ ID NO: 2575920
uaauuagucaccuagcuau

SEQ ID NO: 2575922 - RNA, 19 nt, Artificial Sequence
  Description of Artificial Sequence: Synthetic oligonucleotide
  Sense strand starting at position 3899 of SEQ ID NO: 1889050
uagcuaggugacuaauuaa

SEQ ID NO: 2575923 - RNA, 19 nt, Artificial Sequence
  Description of Artificial Sequence: Synthetic oligonucleotide
  Antisense strand to SEQ ID NO: 2575922
uuaauuagucaccuagcua

SEQ ID NO: 2575924 - RNA, 19 nt, Artificial Sequence
  Description of Artificial Sequence: Synthetic oligonucleotide
  Sense strand starting at position 3902 of SEQ ID NO: 1889050
cuaggugacuaauuaauua

SEQ ID NO: 2575925 - RNA, 19 nt, Artificial Sequence
  Description of Artificial Sequence: Synthetic oligonucleotide
  Antisense strand to SEQ ID NO: 2575924
uaauuaauuagucaccuag

SEQ ID NO: 2575926 - RNA, 19 nt, Artificial Sequence
  Description of Artificial Sequence: Synthetic oligonucleotide
  Sense strand starting at position 1827 of SEQ ID NO: 1889051
cuucgcuuucgcuuagacu

SEQ ID NO: 2575927 - RNA, 19 nt, Artificial Sequence
  Description of Artificial Sequence: Synthetic oligonucleotide
  Antisense strand to SEQ ID NO: 2575926
agucuaagcgaaagcgaag

SEQ ID NO: 2575928 - RNA, 19 nt, Artificial Sequence
  Description of Artificial Sequence: Synthetic oligonucleotide
  Sense strand starting at position 1857 of SEQ ID NO: 1889051
ccauuaggcucaggaaauu

SEQ ID NO: 2575929 - RNA, 19 nt, Artificial Sequence
  Description of Artificial Sequence: Synthetic oligonucleotide
  Antisense strand to SEQ ID NO: 2575928
aauuuccugagccuaaugg

SEQ ID NO: 2575930 - RNA, 19 nt, Artificial Sequence
  Description of Artificial Sequence: Synthetic oligonucleotide
  Sense strand starting at position 1869 of SEQ ID NO: 1889051
ggaaauuaccugggcugua

SEQ ID NO: 2575931 - RNA, 19 nt, Artificial Sequence
  Description of Artificial Sequence: Synthetic oligonucleotide
  Antisense strand to SEQ ID NO: 2575930
uacagcccagguaauuucc

SEQ ID NO: 2575932 - RNA, 19 nt, Artificial Sequence
  Description of Artificial Sequence: Synthetic oligonucleotide
  Sense strand starting at position 2489 of SEQ ID NO: 1889051
cccgaucacgcuugauuua

SEQ ID NO: 2575933 - RNA, 19 nt, Artificial Sequence
  Description of Artificial Sequence: Synthetic oligonucleotide
  Antisense strand to SEQ ID NO: 2575932
uaaaucaagcgugaucggg

SEQ ID NO: 2575934 - RNA, 19 nt, Artificial Sequence
  Description of Artificial Sequence: Synthetic oligonucleotide
  Sense strand starting at position 2618 of SEQ ID NO: 1889051
guggaaaucuaucaucaag

SEQ ID NO: 2575935 - RNA, 19 nt, Artificial Sequence
  Description of Artificial Sequence: Synthetic oligonucleotide
  Antisense strand to SEQ ID NO: 2575934
cuugaugauagauuuccac

SEQ ID NO: 2575936 - RNA, 19 nt, Artificial Sequence
  Description of Artificial Sequence: Synthetic oligonucleotide
  Sense strand starting at position 3135 of SEQ ID NO: 1889051
ucagaccugugcucagaau

SEQ ID NO: 2575937 - RNA, 19 nt, Artificial Sequence
  Description of Artificial Sequence: Synthetic oligonucleotide
  Antisense strand to SEQ ID NO: 2575936
auucugagcacaggucuga

SEQ ID NO: 2575938 - RNA, 19 nt, Artificial Sequence
  Description of Artificial Sequence: Synthetic oligonucleotide
  Sense strand starting at position 3941 of SEQ ID NO: 1889051
augaccuguucgugccuua

SEQ ID NO: 2575939 - RNA, 19 nt, Artificial Sequence
  Description of Artificial Sequence: Synthetic oligonucleotide
  Antisense strand to SEQ ID NO: 2575938
uaaggcacgaacaggucau

SEQ ID NO: 2575940 - RNA, 19 nt, Artificial Sequence
  Description of Artificial Sequence: Synthetic oligonucleotide
  Sense strand starting at position 3944 of SEQ ID NO: 1889051
accuguucgugccuuaacu

SEQ ID NO: 2575941 - RNA, 19 nt, Artificial Sequence
  Description of Artificial Sequence: Synthetic oligonucleotide
  Antisense strand to SEQ ID NO: 2575940
aguuaaggcacgaacaggu

SEQ ID NO: 2575942 - RNA, 19 nt, Artificial Sequence
  Description of Artificial Sequence: Synthetic oligonucleotide
  Sense strand starting at position 50 of SEQ ID NO: 1889052
agauaagugaguugcccaa

SEQ ID NO: 2575943 - RNA, 19 nt, Artificial Sequence
  Description of Artificial Sequence: Synthetic oligonucleotide
  Antisense strand to SEQ ID NO: 2575942
uugggcaacucacuuaucu

SEQ ID NO: 2575944 - RNA, 19 nt, Artificial Sequence
  Description of Artificial Sequence: Synthetic oligonucleotide
  Sense strand starting at position 242 of SEQ ID NO: 1889052
cgaagccaacaaugauaau

SEQ ID NO: 2575945 - RNA, 19 nt, Artificial Sequence
  Description of Artificial Sequence: Synthetic oligonucleotide
  Antisense strand to SEQ ID NO: 2575944
auuaucauuguuggcuucg

SEQ ID NO: 2575946 - RNA, 19 nt, Artificial Sequence
  Description of Artificial Sequence: Synthetic oligonucleotide
  Sense strand starting at position 491 of SEQ ID NO: 1889052
aaggcaucuuaaguguaca

SEQ ID NO: 2575947 - RNA, 19 nt, Artificial Sequence
  Description of Artificial Sequence: Synthetic oligonucleotide
  Antisense strand to SEQ ID NO: 2575946
uguacacuuaagaugccuu

SEQ ID NO: 2575948 - RNA, 19 nt, Artificial Sequence
  Description of Artificial Sequence: Synthetic oligonucleotide
  Sense strand starting at position 617 of SEQ ID NO: 1889052
aacggauacuccuuucgga

SEQ ID NO: 2575949 - RNA, 19 nt, Artificial Sequence
  Description of Artificial Sequence: Synthetic oligonucleotide
  Antisense strand to SEQ ID NO: 2575948
uccgaaaggaguauccguu

SEQ ID NO: 2575950 - RNA, 19 nt, Artificial Sequence
  Description of Artificial Sequence: Synthetic oligonucleotide
  Sense strand starting at position 624 of SEQ ID NO: 1889052
acuccuuucggagaguagu

SEQ ID NO: 2575951 - RNA, 19 nt, Artificial Sequence
  Description of Artificial Sequence: Synthetic oligonucleotide
  Antisense strand to SEQ ID NO: 2575950
acuacucuccgaaaggagu

SEQ ID NO: 2575952 - RNA, 19 nt, Artificial Sequence
  Description of Artificial Sequence: Synthetic oligonucleotide
  Sense strand starting at position 639 of SEQ ID NO: 1889052
uagugcauuuaagagauca

SEQ ID NO: 2575953 - RNA, 19 nt, Artificial Sequence
  Description of Artificial Sequence: Synthetic oligonucleotide
  Antisense strand to SEQ ID NO: 2575952
ugaucucuuaaaugcacua

SEQ ID NO: 2575954 - RNA, 19 nt, Artificial Sequence
  Description of Artificial Sequence: Synthetic oligonucleotide
  Sense strand starting at position 740 of SEQ ID NO: 1889052
agucuuugggcucaguuua

SEQ ID NO: 2575955 - RNA, 19 nt, Artificial Sequence
  Description of Artificial Sequence: Synthetic oligonucleotide
  Antisense strand to SEQ ID NO: 2575954
uaaacugagcccaaagacu

SEQ ID NO: 2575956 - RNA, 19 nt, Artificial Sequence
  Description of Artificial Sequence: Synthetic oligonucleotide
  Sense strand starting at position 753 of SEQ ID NO: 1889052
aguuuaguuccacaaacau

SEQ ID NO: 2575957 - RNA, 19 nt, Artificial Sequence
  Description of Artificial Sequence: Synthetic oligonucleotide
  Antisense strand to SEQ ID NO: 2575956
auguuuguggaacuaaacu

SEQ ID NO: 2575958 - RNA, 19 nt, Artificial Sequence
  Description of Artificial Sequence: Synthetic oligonucleotide
  Sense strand starting at position 772 of SEQ ID NO: 1889052
uuuauaugugccuacuaug

SEQ ID NO: 2575959 - RNA, 19 nt, Artificial Sequence
  Description of Artificial Sequence: Synthetic oligonucleotide
  Antisense strand to SEQ ID NO: 2575958
cauaguaggcacauauaaa

SEQ ID NO: 2575960 - RNA, 19 nt, Artificial Sequence
  Description of Artificial Sequence: Synthetic oligonucleotide
  Sense strand starting at position 1635 of SEQ ID NO: 1889052
gguugaaguccuggaagag

SEQ ID NO: 2575961 - RNA, 19 nt, Artificial Sequence
  Description of Artificial Sequence: Synthetic oligonucleotide
  Antisense strand to SEQ ID NO: 2575960
cucuuccaggacuucaacc

SEQ ID NO: 2575962 - RNA, 19 nt, Artificial Sequence
  Description of Artificial Sequence: Synthetic oligonucleotide
  Sense strand starting at position 2313 of SEQ ID NO: 1889052
uccagauaugcuggcuauu

SEQ ID NO: 2575963 - RNA, 19 nt, Artificial Sequence
  Description of Artificial Sequence: Synthetic oligonucleotide
  Antisense strand to SEQ ID NO: 2575962
aauagccagcauaucugga

SEQ ID NO: 2575964 - RNA, 19 nt, Artificial Sequence
  Description of Artificial Sequence: Synthetic oligonucleotide
  Sense strand starting at position 2494 of SEQ ID NO: 1889052
cuuggauccugucuaaacu

SEQ ID NO: 2575965 - RNA, 19 nt, Artificial Sequence
  Description of Artificial Sequence: Synthetic oligonucleotide
  Antisense strand to SEQ ID NO: 2575964
aguuuagacaggauccaag

SEQ ID NO: 2575966 - RNA, 19 nt, Artificial Sequence
  Description of Artificial Sequence: Synthetic oligonucleotide
  Sense strand starting at position 2495 of SEQ ID NO: 1889052
uuggauccugucuaaacuu

SEQ ID NO: 2575967 - RNA, 19 nt, Artificial Sequence
  Description of Artificial Sequence: Synthetic oligonucleotide
  Antisense strand to SEQ ID NO: 2575966
aaguuuagacaggauccaa

SEQ ID NO: 2575968 - RNA, 19 nt, Artificial Sequence
  Description of Artificial Sequence: Synthetic oligonucleotide
  Sense strand starting at position 2503 of SEQ ID NO: 1889052
ugucuaaacuuugugguca

SEQ ID NO: 2575969 - RNA, 19 nt, Artificial Sequence
  Description of Artificial Sequence: Synthetic oligonucleotide
  Antisense strand to SEQ ID NO: 2575968
ugaccacaaaguuuagaca

SEQ ID NO: 2575970 - RNA, 19 nt, Artificial Sequence
  Description of Artificial Sequence: Synthetic oligonucleotide
  Sense strand starting at position 2593 of SEQ ID NO: 1889052
agucaacaucuuugagucu

SEQ ID NO: 2575971 - RNA, 19 nt, Artificial Sequence
  Description of Artificial Sequence: Synthetic oligonucleotide
  Antisense strand to SEQ ID NO: 2575970
agacucaaagauguugacu

SEQ ID NO: 2575972 - RNA, 19 nt, Artificial Sequence
  Description of Artificial Sequence: Synthetic oligonucleotide
  Sense strand starting at position 2660 of SEQ ID NO: 1889052
gcguguuaggaagauucag

SEQ ID NO: 2575973 - RNA, 19 nt, Artificial Sequence
  Description of Artificial Sequence: Synthetic oligonucleotide
  Antisense strand to SEQ ID NO: 2575972
cugaaucuuccuaacacgc

SEQ ID NO: 2575974 - RNA, 19 nt, Artificial Sequence
  Description of Artificial Sequence: Synthetic oligonucleotide
  Sense strand starting at position 2679 of SEQ ID NO: 1889052
ugagaucgugugcauaaca

SEQ ID NO: 2575975 - RNA, 19 nt, Artificial Sequence
  Description of Artificial Sequence: Synthetic oligonucleotide
  Antisense strand to SEQ ID NO: 2575974
uguuaugcacacgaucuca

SEQ ID NO: 2575976 - RNA, 19 nt, Artificial Sequence
  Description of Artificial Sequence: Synthetic oligonucleotide
  Sense strand starting at position 2706 of SEQ ID NO: 1889052
gguacaugcuagguguaca

SEQ ID NO: 2575977 - RNA, 19 nt, Artificial Sequence
  Description of Artificial Sequence: Synthetic oligonucleotide
  Antisense strand to SEQ ID NO: 2575976
uguacaccuagcauguacc

SEQ ID NO: 2575978 - RNA, 19 nt, Artificial Sequence
  Description of Artificial Sequence: Synthetic oligonucleotide
  Sense strand starting at position 2707 of SEQ ID NO: 1889052
guacaugcuagguguacaa

SEQ ID NO: 2575979 - RNA, 19 nt, Artificial Sequence
  Description of Artificial Sequence: Synthetic oligonucleotide
  Antisense strand to SEQ ID NO: 2575978
uuguacaccuagcauguac

SEQ ID NO: 2575980 - RNA, 19 nt, Artificial Sequence
  Description of Artificial Sequence: Synthetic oligonucleotide
  Sense strand starting at position 2711 of SEQ ID NO: 1889052
augcuagguguacaaagaa

SEQ ID NO: 2575981 - RNA, 19 nt, Artificial Sequence
  Description of Artificial Sequence: Synthetic oligonucleotide
  Antisense strand to SEQ ID NO: 2575980
uucuuuguacaccuagcau

SEQ ID NO: 2575982 - RNA, 19 nt, Artificial Sequence
  Description of Artificial Sequence: Synthetic oligonucleotide
  Sense strand starting at position 2757 of SEQ ID NO: 1889052
gugucaaccuccucaagga

SEQ ID NO: 2575983 - RNA, 19 nt, Artificial Sequence
  Description of Artificial Sequence: Synthetic oligonucleotide
  Antisense strand to SEQ ID NO: 2575982
uccuugaggagguugacac

SEQ ID NO: 2575984 - RNA, 19 nt, Artificial Sequence
  Description of Artificial Sequence: Synthetic oligonucleotide
  Sense strand starting at position 2891 of SEQ ID NO: 1889052
agucuacuaucauuaugga

SEQ ID NO: 2575985 - RNA, 19 nt, Artificial Sequence
  Description of Artificial Sequence: Synthetic oligonucleotide
  Antisense strand to SEQ ID NO: 2575984
uccauaaugauaguagacu

SEQ ID NO: 2575986 - RNA, 19 nt, Artificial Sequence
  Description of Artificial Sequence: Synthetic oligonucleotide
  Sense strand starting at position 2892 of SEQ ID NO: 1889052
gucuacuaucauuauggau

SEQ ID NO: 2575987 - RNA, 19 nt, Artificial Sequence
  Description of Artificial Sequence: Synthetic oligonucleotide
  Antisense strand to SEQ ID NO: 2575986
auccauaaugauaguagac

SEQ ID NO: 2575988 - RNA, 19 nt, Artificial Sequence
  Description of Artificial Sequence: Synthetic oligonucleotide
  Sense strand starting at position 2907 of SEQ ID NO: 1889052
ggauaauagucauccuuug

SEQ ID NO: 2575989 - RNA, 19 nt, Artificial Sequence
  Description of Artificial Sequence: Synthetic oligonucleotide
  Antisense strand to SEQ ID NO: 2575988
caaaggaugacuauuaucc

SEQ ID NO: 2575990 - RNA, 19 nt, Artificial Sequence
  Description of Artificial Sequence: Synthetic oligonucleotide
  Sense strand starting at position 2992 of SEQ ID NO: 1889052
ucacaauugcgauagucau

SEQ ID NO: 2575991 - RNA, 19 nt, Artificial Sequence
  Description of Artificial Sequence: Synthetic oligonucleotide
  Antisense strand to SEQ ID NO: 2575990
augacuaucgcaauuguga

SEQ ID NO: 2575992 - RNA, 19 nt, Artificial Sequence
  Description of Artificial Sequence: Synthetic oligonucleotide
  Sense strand starting at position 3005 of SEQ ID NO: 1889052
agucauacuuagucuugau

SEQ ID NO: 2575993 - RNA, 19 nt, Artificial Sequence
  Description of Artificial Sequence: Synthetic oligonucleotide
  Antisense strand to SEQ ID NO: 2575992
aucaagacuaaguaugacu

SEQ ID NO: 2575994 - RNA, 19 nt, Artificial Sequence
  Description of Artificial Sequence: Synthetic oligonucleotide
  Sense strand starting at position 3009 of SEQ ID NO: 1889052
auacuuagucuugauguau

SEQ ID NO: 2575995 - RNA, 19 nt, Artificial Sequence
  Description of Artificial Sequence: Synthetic oligonucleotide
  Antisense strand to SEQ ID NO: 2575994
auacaucaagacuaaguau

SEQ ID NO: 2575996 - RNA, 19 nt, Artificial Sequence
  Description of Artificial Sequence: Synthetic oligonucleotide
  Sense strand starting at position 3123 of SEQ ID NO: 1889052
aagguugaguaauccaaau

SEQ ID NO: 2575997 - RNA, 19 nt, Artificial Sequence
  Description of Artificial Sequence: Synthetic oligonucleotide
  Antisense strand to SEQ ID NO: 2575996
auuuggauuacucaaccuu

SEQ ID NO: 2575998 - RNA, 19 nt, Artificial Sequence
  Description of Artificial Sequence: Synthetic oligonucleotide
  Sense strand starting at position 3236 of SEQ ID NO: 1889052
agaggagguucucaaugaa

SEQ ID NO: 2575999 - RNA, 19 nt, Artificial Sequence
  Description of Artificial Sequence: Synthetic oligonucleotide
  Antisense strand to SEQ ID NO: 2575998
uucauugagaaccuccucu

SEQ ID NO: 2576000 - RNA, 19 nt, Artificial Sequence
  Description of Artificial Sequence: Synthetic oligonucleotide
  Sense strand starting at position 3239 of SEQ ID NO: 1889052
ggagguucucaaugaacac

SEQ ID NO: 2576001 - RNA, 19 nt, Artificial Sequence
  Description of Artificial Sequence: Synthetic oligonucleotide
  Antisense strand to SEQ ID NO: 2576000
guguucauugagaaccucc

SEQ ID NO: 2576002 - RNA, 19 nt, Artificial Sequence
  Description of Artificial Sequence: Synthetic oligonucleotide
  Sense strand starting at position 3272 of SEQ ID NO: 1889052
ggaauuaaggcgcagagaa

SEQ ID NO: 2576003 - RNA, 19 nt, Artificial Sequence
  Description of Artificial Sequence: Synthetic oligonucleotide
  Antisense strand to SEQ ID NO: 2576002
uucucugcgccuuaauucc

SEQ ID NO: 2576004 - RNA, 19 nt, Artificial Sequence
  Description of Artificial Sequence: Synthetic oligonucleotide
  Sense strand starting at position 3282 of SEQ ID NO: 1889052
cgcagagaagcuuguauaa

SEQ ID NO: 2576005 - RNA, 19 nt, Artificial Sequence
  Description of Artificial Sequence: Synthetic oligonucleotide
  Antisense strand to SEQ ID NO: 2576004
uuauacaagcuucucugcg

SEQ ID NO: 2576006 - RNA, 19 nt, Artificial Sequence
  Description of Artificial Sequence: Synthetic oligonucleotide
  Sense strand starting at position 3460 of SEQ ID NO: 1889052
agaagauggucugccaguu

SEQ ID NO: 2576007 - RNA, 19 nt, Artificial Sequence
  Description of Artificial Sequence: Synthetic oligonucleotide
  Antisense strand to SEQ ID NO: 2576006
aacuggcagaccaucuucu

SEQ ID NO: 2576008 - RNA, 19 nt, Artificial Sequence
  Description of Artificial Sequence: Synthetic oligonucleotide
  Sense strand starting at position 3566 of SEQ ID NO: 1889052
ggcagacgcuacuuuaaug

SEQ ID NO: 2576009 - RNA, 19 nt, Artificial Sequence
  Description of Artificial Sequence: Synthetic oligonucleotide
  Antisense strand to SEQ ID NO: 2576008
cauuaaaguagcgucugcc

SEQ ID NO: 2576010 - RNA, 19 nt, Artificial Sequence
  Description of Artificial Sequence: Synthetic oligonucleotide
  Sense strand starting at position 3644 of SEQ ID NO: 1889052
gcaguucuuccagaguuga

SEQ ID NO: 2576011 - RNA, 19 nt, Artificial Sequence
  Description of Artificial Sequence: Synthetic oligonucleotide
  Antisense strand to SEQ ID NO: 2576010
ucaacucuggaagaacugc

SEQ ID NO: 2576012 - RNA, 19 nt, Artificial Sequence
  Description of Artificial Sequence: Synthetic oligonucleotide
  Sense strand starting at position 3669 of SEQ ID NO: 1889052
ccuggaagcuaucuagcaa

SEQ ID NO: 2576013 - RNA, 19 nt, Artificial Sequence
  Description of Artificial Sequence: Synthetic oligonucleotide
  Antisense strand to SEQ ID NO: 2576012
uugcuagauagcuuccagg

SEQ ID NO: 2576014 - RNA, 19 nt, Artificial Sequence
  Description of Artificial Sequence: Synthetic oligonucleotide
  Sense strand starting at position 3708 of SEQ ID NO: 1889052
acaaauuacuugucagugu

SEQ ID NO: 2576015 - RNA, 19 nt, Artificial Sequence
  Description of Artificial Sequence: Synthetic oligonucleotide
  Antisense strand to SEQ ID NO: 2576014
acacugacaaguaauuugu

SEQ ID NO: 2576016 - RNA, 19 nt, Artificial Sequence
  Description of Artificial Sequence: Synthetic oligonucleotide
  Sense strand starting at position 3733 of SEQ ID NO: 1889052
uugcucugacaagguaaau

SEQ ID NO: 2576017 - RNA, 19 nt, Artificial Sequence
  Description of Artificial Sequence: Synthetic oligonucleotide
  Antisense strand to SEQ ID NO: 2576016
auuuaccuugucagagcaa

SEQ ID NO: 2576018 - RNA, 19 nt, Artificial Sequence
  Description of Artificial Sequence: Synthetic oligonucleotide
  Sense strand starting at position 3768 of SEQ ID NO: 1889052
ugaaccugucugugaggaa

SEQ ID NO: 2576019 - RNA, 19 nt, Artificial Sequence
  Description of Artificial Sequence: Synthetic oligonucleotide
  Antisense strand to SEQ ID NO: 2576018
uuccucacagacagguuca

SEQ ID NO: 2576020 - RNA, 19 nt, Artificial Sequence
  Description of Artificial Sequence: Synthetic oligonucleotide
  Sense strand starting at position 3838 of SEQ ID NO: 1889052
gguggauuaccuggacuga

SEQ ID NO: 2576021 - RNA, 19 nt, Artificial Sequence
  Description of Artificial Sequence: Synthetic oligonucleotide
  Antisense strand to SEQ ID NO: 2576020
ucaguccagguaauccacc

SEQ ID NO: 2576022 - RNA, 19 nt, Artificial Sequence
  Description of Artificial Sequence: Synthetic oligonucleotide
  Sense strand starting at position 159 of SEQ ID NO: 1889053
aguaaauaccuuugugaac

SEQ ID NO: 2576023 - RNA, 19 nt, Artificial Sequence
  Description of Artificial Sequence: Synthetic oligonucleotide
  Antisense strand to SEQ ID NO: 2576022
guucacaaagguauuuacu

SEQ ID NO: 2576024 - RNA, 19 nt, Artificial Sequence
  Description of Artificial Sequence: Synthetic oligonucleotide
  Sense strand starting at position 160 of SEQ ID NO: 1889053
guaaauaccuuugugaaca

SEQ ID NO: 2576025 - RNA, 19 nt, Artificial Sequence
  Description of Artificial Sequence: Synthetic oligonucleotide
  Antisense strand to SEQ ID NO: 2576024
uguucacaaagguauuuac

SEQ ID NO: 2576026 - RNA, 19 nt, Artificial Sequence
  Description of Artificial Sequence: Synthetic oligonucleotide
  Sense strand starting at position 255 of SEQ ID NO: 1889053
ugcugaguugggcaaacaa

SEQ ID NO: 2576027 - RNA, 19 nt, Artificial Sequence
  Description of Artificial Sequence: Synthetic oligonucleotide
  Antisense strand to SEQ ID NO: 2576026
uuguuugcccaacucagca

SEQ ID NO: 2576028 - RNA, 19 nt, Artificial Sequence
  Description of Artificial Sequence: Synthetic oligonucleotide
  Sense strand starting at position 311 of SEQ ID NO: 1889053
uggacuagagcaugauaca

SEQ ID NO: 2576029 - RNA, 19 nt, Artificial Sequence
  Description of Artificial Sequence: Synthetic oligonucleotide
  Antisense strand to SEQ ID NO: 2576028
uguaucaugcucuagucca

SEQ ID NO: 2576030 - RNA, 19 nt, Artificial Sequence
  Description of Artificial Sequence: Synthetic oligonucleotide
  Sense strand starting at position 396 of SEQ ID NO: 1889053
ucacccucagaauguuaga

SEQ ID NO: 2576031 - RNA, 19 nt, Artificial Sequence
  Description of Artificial Sequence: Synthetic oligonucleotide
  Antisense strand to SEQ ID NO: 2576030
ucuaacauucugaggguga

SEQ ID NO: 2576032 - RNA, 19 nt, Artificial Sequence
  Description of Artificial Sequence: Synthetic oligonucleotide
  Sense strand starting at position 458 of SEQ ID NO: 1889053
auaaaugguuuagcaauga

SEQ ID NO: 2576033 - RNA, 19 nt, Artificial Sequence
  Description of Artificial Sequence: Synthetic oligonucleotide
  Antisense strand to SEQ ID NO: 2576032
ucauugcuaaaccauuuau

SEQ ID NO: 2576034 - RNA, 19 nt, Artificial Sequence
  Description of Artificial Sequence: Synthetic oligonucleotide
  Sense strand starting at position 463 of SEQ ID NO: 1889053
ugguuuagcaaugaugcua

SEQ ID NO: 2576035 - RNA, 19 nt, Artificial Sequence
  Description of Artificial Sequence: Synthetic oligonucleotide
  Antisense strand to SEQ ID NO: 2576034
uagcaucauugcuaaacca

SEQ ID NO: 2576036 - RNA, 19 nt, Artificial Sequence
  Description of Artificial Sequence: Synthetic oligonucleotide
  Sense strand starting at position 767 of SEQ ID NO: 1889053
ugcaacuaacccuagaguu

SEQ ID NO: 2576037 - RNA, 19 nt, Artificial Sequence
  Description of Artificial Sequence: Synthetic oligonucleotide
  Antisense strand to SEQ ID NO: 2576036
aacucuaggguuaguugca

SEQ ID NO: 2576038 - RNA, 19 nt, Artificial Sequence
  Description of Artificial Sequence: Synthetic oligonucleotide
  Sense strand starting at position 777 of SEQ ID NO: 1889053
ccuagaguucucuaagcca

SEQ ID NO: 2576039 - RNA, 19 nt, Artificial Sequence
  Description of Artificial Sequence: Synthetic oligonucleotide
  Antisense strand to SEQ ID NO: 2576038
uggcuuagagaacucuagg

SEQ ID NO: 2576040 - RNA, 19 nt, Artificial Sequence
  Description of Artificial Sequence: Synthetic oligonucleotide
  Sense strand starting at position 780 of SEQ ID NO: 1889053
agaguucucuaagccauag

SEQ ID NO: 2576041 - RNA, 19 nt, Artificial Sequence
  Description of Artificial Sequence: Synthetic oligonucleotide
  Antisense strand to SEQ ID NO: 2576040
cuauggcuuagagaacucu

SEQ ID NO: 2576042 - RNA, 19 nt, Artificial Sequence
  Description of Artificial Sequence: Synthetic oligonucleotide
  Sense strand starting at position 849 of SEQ ID NO: 1889053
uuggcaaccgaauaugauu

SEQ ID NO: 2576043 - RNA, 19 nt, Artificial Sequence
  Description of Artificial Sequence: Synthetic oligonucleotide
  Antisense strand to SEQ ID NO: 2576042
aaucauauucgguugccaa

SEQ ID NO: 2576044 - RNA, 19 nt, Artificial Sequence
  Description of Artificial Sequence: Synthetic oligonucleotide
  Sense strand starting at position 887 of SEQ ID NO: 1889053
ggagauuacugagcucaga

SEQ ID NO: 2576045 - RNA, 19 nt, Artificial Sequence
  Description of Artificial Sequence: Synthetic oligonucleotide
  Antisense strand to SEQ ID NO: 2576044
ucugagcucaguaaucucc

SEQ ID NO: 2576046 - RNA, 19 nt, Artificial Sequence
  Description of Artificial Sequence: Synthetic oligonucleotide
  Sense strand starting at position 1167 of SEQ ID NO: 1889053
acgacaaagucucuaccau

SEQ ID NO: 2576047 - RNA, 19 nt, Artificial Sequence
  Description of Artificial Sequence: Synthetic oligonucleotide
  Antisense strand to SEQ ID NO: 2576046
augguagagacuuugucgu

SEQ ID NO: 2576048 - RNA, 19 nt, Artificial Sequence
  Description of Artificial Sequence: Synthetic oligonucleotide
  Sense strand starting at position 1168 of SEQ ID NO: 1889053
cgacaaagucucuaccauc

SEQ ID NO: 2576049 - RNA, 19 nt, Artificial Sequence
  Description of Artificial Sequence: Synthetic oligonucleotide
  Antisense strand to SEQ ID NO: 2576048
gaugguagagacuuugucg

SEQ ID NO: 2576050 - RNA, 19 nt, Artificial Sequence
  Description of Artificial Sequence: Synthetic oligonucleotide
  Sense strand starting at position 1390 of SEQ ID NO: 1889053
guaacaucuccagaauguu

SEQ ID NO: 2576051 - RNA, 19 nt, Artificial Sequence
  Description of Artificial Sequence: Synthetic oligonucleotide
  Antisense strand to SEQ ID NO: 2576050
aacauucuggagauguuac

SEQ ID NO: 2576052 - RNA, 19 nt, Artificial Sequence
  Description of Artificial Sequence: Synthetic oligonucleotide
  Sense strand starting at position 1652 of SEQ ID NO: 1889053
cugguucugacuugagaag

SEQ ID NO: 2576053 - RNA, 19 nt, Artificial Sequence
  Description of Artificial Sequence: Synthetic oligonucleotide
  Antisense strand to SEQ ID NO: 2576052
cuucucaagucagaaccag

SEQ ID NO: 2576054 - RNA, 19 nt, Artificial Sequence
  Description of Artificial Sequence: Synthetic oligonucleotide
  Sense strand starting at position 1688 of SEQ ID NO: 1889053
aacccucagcgauaguuaa

SEQ ID NO: 2576055 - RNA, 19 nt, Artificial Sequence
  Description of Artificial Sequence: Synthetic oligonucleotide
  Antisense strand to SEQ ID NO: 2576054
uuaacuaucgcugaggguu

SEQ ID NO: 2576056 - RNA, 19 nt, Artificial Sequence
  Description of Artificial Sequence: Synthetic oligonucleotide
  Sense strand starting at position 1824 of SEQ ID NO: 1889053
gggccuucaggugauuaaa

SEQ ID NO: 2576057 - RNA, 19 nt, Artificial Sequence
  Description of Artificial Sequence: Synthetic oligonucleotide
  Antisense strand to SEQ ID NO: 2576056
uuuaaucaccugaaggccc

SEQ ID NO: 2576058 - RNA, 19 nt, Artificial Sequence
  Description of Artificial Sequence: Synthetic oligonucleotide
  Sense strand starting at position 1835 of SEQ ID NO: 1889053
ugauuaaagcucugaagga

SEQ ID NO: 2576059 - RNA, 19 nt, Artificial Sequence
  Description of Artificial Sequence: Synthetic oligonucleotide
  Antisense strand to SEQ ID NO: 2576058
uccuucagagcuuuaauca

SEQ ID NO: 2576060 - RNA, 19 nt, Artificial Sequence
  Description of Artificial Sequence: Synthetic oligonucleotide
  Sense strand starting at position 1839 of SEQ ID NO: 1889053
uaaagcucugaaggaaagu

SEQ ID NO: 2576061 - RNA, 19 nt, Artificial Sequence
  Description of Artificial Sequence: Synthetic oligonucleotide
  Antisense strand to SEQ ID NO: 2576060
acuuuccuucagagcuuua

SEQ ID NO: 2576062 - RNA, 19 nt, Artificial Sequence
  Description of Artificial Sequence: Synthetic oligonucleotide
  Sense strand starting at position 2069 of SEQ ID NO: 1889053
gggaggaagugcuugggaa

SEQ ID NO: 2576063 - RNA, 19 nt, Artificial Sequence
  Description of Artificial Sequence: Synthetic oligonucleotide
  Antisense strand to SEQ ID NO: 2576062
uucccaagcacuuccuccc

SEQ ID NO: 2576064 - RNA, 19 nt, Artificial Sequence
  Description of Artificial Sequence: Synthetic oligonucleotide
  Sense strand starting at position 2070 of SEQ ID NO: 1889053
ggaggaagugcuugggaaa

SEQ ID NO: 2576065 - RNA, 19 nt, Artificial Sequence
  Description of Artificial Sequence: Synthetic oligonucleotide
  Antisense strand to SEQ ID NO: 2576064
uuucccaagcacuuccucc

SEQ ID NO: 2576066 - RNA, 19 nt, Artificial Sequence
  Description of Artificial Sequence: Synthetic oligonucleotide
  Sense strand starting at position 2071 of SEQ ID NO: 1889053
gaggaagugcuugggaaag

SEQ ID NO: 2576067 - RNA, 19 nt, Artificial Sequence
  Description of Artificial Sequence: Synthetic oligonucleotide
  Antisense strand to SEQ ID NO: 2576066
cuuucccaagcacuuccuc

SEQ ID NO: 2576068 - RNA, 19 nt, Artificial Sequence
  Description of Artificial Sequence: Synthetic oligonucleotide
  Sense strand starting at position 2136 of SEQ ID NO: 1889053
uguguauguacagauguga

SEQ ID NO: 2576069 - RNA, 19 nt, Artificial Sequence
  Description of Artificial Sequence: Synthetic oligonucleotide
  Antisense strand to SEQ ID NO: 2576068
ucacaucuguacauacaca

SEQ ID NO: 2576070 - RNA, 19 nt, Artificial Sequence
  Description of Artificial Sequence: Synthetic oligonucleotide
  Sense strand starting at position 2153 of SEQ ID NO: 1889053
gauccuguacgacauacaa

SEQ ID NO: 2576071 - RNA, 19 nt, Artificial Sequence
  Description of Artificial Sequence: Synthetic oligonucleotide
  Antisense strand to SEQ ID NO: 2576070
uuguaugucguacaggauc

SEQ ID NO: 2576072 - RNA, 19 nt, Artificial Sequence
  Description of Artificial Sequence: Synthetic oligonucleotide
  Sense strand starting at position 2179 of SEQ ID NO: 1889053
ugagaacugcacugaguaa

SEQ ID NO: 2576073 - RNA, 19 nt, Artificial Sequence
  Description of Artificial Sequence: Synthetic oligonucleotide
  Antisense strand to SEQ ID NO: 2576072
uuacucagugcaguucuca

SEQ ID NO: 2576074 - RNA, 19 nt, Artificial Sequence
  Description of Artificial Sequence: Synthetic oligonucleotide
  Sense strand starting at position 2227 of SEQ ID NO: 1889053
gcugaucaugcuuaacaga

SEQ ID NO: 2576075 - RNA, 19 nt, Artificial Sequence
  Description of Artificial Sequence: Synthetic oligonucleotide
  Antisense strand to SEQ ID NO: 2576074
ucuguuaagcaugaucagc

SEQ ID NO: 2576076 - RNA, 19 nt, Artificial Sequence
  Description of Artificial Sequence: Synthetic oligonucleotide
  Sense strand starting at position 2257 of SEQ ID NO: 1889053
uugcaaaggcuuugaaaug

SEQ ID NO: 2576077 - RNA, 19 nt, Artificial Sequence
  Description of Artificial Sequence: Synthetic oligonucleotide
  Antisense strand to SEQ ID NO: 2576076
cauuucaaagccuuugcaa

SEQ ID NO: 2576078 - RNA, 19 nt, Artificial Sequence
  Description of Artificial Sequence: Synthetic oligonucleotide
  Sense strand starting at position 2703 of SEQ ID NO: 1889053
gcauaacacuucucaagug

SEQ ID NO: 2576079 - RNA, 19 nt, Artificial Sequence
  Description of Artificial Sequence: Synthetic oligonucleotide
  Antisense strand to SEQ ID NO: 2576078
cacuugagaaguguuaugc

SEQ ID NO: 2576080 - RNA, 19 nt, Artificial Sequence
  Description of Artificial Sequence: Synthetic oligonucleotide
  Sense strand starting at position 2815 of SEQ ID NO: 1889053
gagagauuguugccaucag

SEQ ID NO: 2576081 - RNA, 19 nt, Artificial Sequence
  Description of Artificial Sequence: Synthetic oligonucleotide
  Antisense strand to SEQ ID NO: 2576080
cugauggcaacaaucucuc

SEQ ID NO: 2576082 - RNA, 19 nt, Artificial Sequence
  Description of Artificial Sequence: Synthetic oligonucleotide
  Sense strand starting at position 2819 of SEQ ID NO: 1889053
gauuguugccaucagaccu

SEQ ID NO: 2576083 - RNA, 19 nt, Artificial Sequence
  Description of Artificial Sequence: Synthetic oligonucleotide
  Antisense strand to SEQ ID NO: 2576082
aggucugauggcaacaauc

SEQ ID NO: 2576084 - RNA, 19 nt, Artificial Sequence
  Description of Artificial Sequence: Synthetic oligonucleotide
  Sense strand starting at position 2858 of SEQ ID NO: 1889053
agaagcuuccugcaugaga

SEQ ID NO: 2576085 - RNA, 19 nt, Artificial Sequence
  Description of Artificial Sequence: Synthetic oligonucleotide
  Antisense strand to SEQ ID NO: 2576084
ucucaugcaggaagcuucu

SEQ ID NO: 2576086 - RNA, 19 nt, Artificial Sequence
  Description of Artificial Sequence: Synthetic oligonucleotide
  Sense strand starting at position 2908 of SEQ ID NO: 1889053
gcaugaccugcucaccaau

SEQ ID NO: 2576087 - RNA, 19 nt, Artificial Sequence
  Description of Artificial Sequence: Synthetic oligonucleotide
  Antisense strand to SEQ ID NO: 2576086
auuggugagcaggucaugc

SEQ ID NO: 2576088 - RNA, 19 nt, Artificial Sequence
  Description of Artificial Sequence: Synthetic oligonucleotide
  Sense strand starting at position 2969 of SEQ ID NO: 1889053
agauaugucuuagaauuuc

SEQ ID NO: 2576089 - RNA, 19 nt, Artificial Sequence
  Description of Artificial Sequence: Synthetic oligonucleotide
  Antisense strand to SEQ ID NO: 2576088
gaaauucuaagacauaucu

SEQ ID NO: 2576090 - RNA, 19 nt, Artificial Sequence
  Description of Artificial Sequence: Synthetic oligonucleotide
  Sense strand starting at position 3078 of SEQ ID NO: 1889053
uugcuuaacucagugaaca

SEQ ID NO: 2576091 - RNA, 19 nt, Artificial Sequence
  Description of Artificial Sequence: Synthetic oligonucleotide
  Antisense strand to SEQ ID NO: 2576090
uguucacugaguuaagcaa

SEQ ID NO: 2576092 - RNA, 19 nt, Artificial Sequence
  Description of Artificial Sequence: Synthetic oligonucleotide
  Sense strand starting at position 3079 of SEQ ID NO: 1889053
ugcuuaacucagugaacag

SEQ ID NO: 2576093 - RNA, 19 nt, Artificial Sequence
  Description of Artificial Sequence: Synthetic oligonucleotide
  Antisense strand to SEQ ID NO: 2576092
cuguucacugaguuaagca

SEQ ID NO: 2576094 - RNA, 19 nt, Artificial Sequence
  Description of Artificial Sequence: Synthetic oligonucleotide
  Sense strand starting at position 3239 of SEQ ID NO: 1889053
ccaacuuuaucuguggaga

SEQ ID NO: 2576095 - RNA, 19 nt, Artificial Sequence
  Description of Artificial Sequence: Synthetic oligonucleotide
  Antisense strand to SEQ ID NO: 2576094
ucuccacagauaaaguugg

SEQ ID NO: 2576096 - RNA, 19 nt, Artificial Sequence
  Description of Artificial Sequence: Synthetic oligonucleotide
  Sense strand starting at position 3240 of SEQ ID NO: 1889053
caacuuuaucuguggagac

SEQ ID NO: 2576097 - RNA, 19 nt, Artificial Sequence
  Description of Artificial Sequence: Synthetic oligonucleotide
  Antisense strand to SEQ ID NO: 2576096
gucuccacagauaaaguug

SEQ ID NO: 2576098 - RNA, 19 nt, Artificial Sequence
  Description of Artificial Sequence: Synthetic oligonucleotide
  Sense strand starting at position 3467 of SEQ ID NO: 1889053
cuggauaucccacaggcau

SEQ ID NO: 2576099 - RNA, 19 nt, Artificial Sequence
  Description of Artificial Sequence: Synthetic oligonucleotide
  Antisense strand to SEQ ID NO: 2576098
augccugugggauauccag

SEQ ID NO: 2576100 - RNA, 19 nt, Artificial Sequence
  Description of Artificial Sequence: Synthetic oligonucleotide
  Sense strand starting at position 3604 of SEQ ID NO: 1889053
ggagucaugcuagagcuuu

SEQ ID NO: 2576101 - RNA, 19 nt, Artificial Sequence
  Description of Artificial Sequence: Synthetic oligonucleotide
  Antisense strand to SEQ ID NO: 2576100
aaagcucuagcaugacucc

SEQ ID NO: 2576102 - RNA, 19 nt, Artificial Sequence
  Description of Artificial Sequence: Synthetic oligonucleotide
  Sense strand starting at position 8 of SEQ ID NO: 1889054
gaggauggcugguuuagca

SEQ ID NO: 2576103 - RNA, 19 nt, Artificial Sequence
  Description of Artificial Sequence: Synthetic oligonucleotide
  Antisense strand to SEQ ID NO: 2576102
ugcuaaaccagccauccuc

SEQ ID NO: 2576104 - RNA, 19 nt, Artificial Sequence
  Description of Artificial Sequence: Synthetic oligonucleotide
  Sense strand starting at position 105 of SEQ ID NO: 1889054
auguaaggcucucuaacuu

SEQ ID NO: 2576105 - RNA, 19 nt, Artificial Sequence
  Description of Artificial Sequence: Synthetic oligonucleotide
  Antisense strand to SEQ ID NO: 2576104
aaguuagagagccuuacau

SEQ ID NO: 2576106 - RNA, 19 nt, Artificial Sequence
  Description of Artificial Sequence: Synthetic oligonucleotide
  Sense strand starting at position 158 of SEQ ID NO: 1889054
aguaaauaccuuugugaac

SEQ ID NO: 2576107 - RNA, 19 nt, Artificial Sequence
  Description of Artificial Sequence: Synthetic oligonucleotide
  Antisense strand to SEQ ID NO: 2576106
guucacaaagguauuuacu

SEQ ID NO: 2576108 - RNA, 19 nt, Artificial Sequence
  Description of Artificial Sequence: Synthetic oligonucleotide
  Sense strand starting at position 254 of SEQ ID NO: 1889054
ugcugaguugggcaaacaa

SEQ ID NO: 2576109 - RNA, 19 nt, Artificial Sequence
  Description of Artificial Sequence: Synthetic oligonucleotide
  Antisense strand to SEQ ID NO: 2576108
uuguuugcccaacucagca

SEQ ID NO: 2576110 - RNA, 19 nt, Artificial Sequence
  Description of Artificial Sequence: Synthetic oligonucleotide
  Sense strand starting at position 310 of SEQ ID NO: 1889054
uggacuagagcaugauaca

SEQ ID NO: 2576111 - RNA, 19 nt, Artificial Sequence
  Description of Artificial Sequence: Synthetic oligonucleotide
  Antisense strand to SEQ ID NO: 2576110
uguaucaugcucuagucca

SEQ ID NO: 2576112 - RNA, 19 nt, Artificial Sequence
  Description of Artificial Sequence: Synthetic oligonucleotide
  Sense strand starting at position 395 of SEQ ID NO: 1889054
ucacccucagaauguuaga

SEQ ID NO: 2576113 - RNA, 19 nt, Artificial Sequence
  Description of Artificial Sequence: Synthetic oligonucleotide
  Antisense strand to SEQ ID NO: 2576112
ucuaacauucugaggguga

SEQ ID NO: 2576114 - RNA, 19 nt, Artificial Sequence
  Description of Artificial Sequence: Synthetic oligonucleotide
  Sense strand starting at position 457 of SEQ ID NO: 1889054
auaaaugguuuagcaauga

SEQ ID NO: 2576115 - RNA, 19 nt, Artificial Sequence
  Description of Artificial Sequence: Synthetic oligonucleotide
  Antisense strand to SEQ ID NO: 2576114
ucauugcuaaaccauuuau

SEQ ID NO: 2576116 - RNA, 19 nt, Artificial Sequence
  Description of Artificial Sequence: Synthetic oligonucleotide
  Sense strand starting at position 462 of SEQ ID NO: 1889054
ugguuuagcaaugaugcua

SEQ ID NO: 2576117 - RNA, 19 nt, Artificial Sequence
  Description of Artificial Sequence: Synthetic oligonucleotide
  Antisense strand to SEQ ID NO: 2576116
uagcaucauugcuaaacca

SEQ ID NO: 2576118 - RNA, 19 nt, Artificial Sequence
  Description of Artificial Sequence: Synthetic oligonucleotide
  Sense strand starting at position 766 of SEQ ID NO: 1889054
ugcaacuaacccuagaguu

SEQ ID NO: 2576119 - RNA, 19 nt, Artificial Sequence
  Description of Artificial Sequence: Synthetic oligonucleotide
  Antisense strand to SEQ ID NO: 2576118
aacucuaggguuaguugca

SEQ ID NO: 2576120 - RNA, 19 nt, Artificial Sequence
  Description of Artificial Sequence: Synthetic oligonucleotide
  Sense strand starting at position 776 of SEQ ID NO: 1889054
ccuagaguucucuaagcca

SEQ ID NO: 2576121 - RNA, 19 nt, Artificial Sequence
  Description of Artificial Sequence: Synthetic oligonucleotide
  Antisense strand to SEQ ID NO: 2576120
uggcuuagagaacucuagg

SEQ ID NO: 2576122 - RNA, 19 nt, Artificial Sequence
  Description of Artificial Sequence: Synthetic oligonucleotide
  Sense strand starting at position 779 of SEQ ID NO: 1889054
agaguucucuaagccauag

SEQ ID NO: 2576123 - RNA, 19 nt, Artificial Sequence
  Description of Artificial Sequence: Synthetic oligonucleotide
  Antisense strand to SEQ ID NO: 2576122
cuauggcuuagagaacucu

SEQ ID NO: 2576124 - RNA, 19 nt, Artificial Sequence
  Description of Artificial Sequence: Synthetic oligonucleotide
  Sense strand starting at position 848 of SEQ ID NO: 1889054
uuggcaaccgaauaugauu

SEQ ID NO: 2576125 - RNA, 19 nt, Artificial Sequence
  Description of Artificial Sequence: Synthetic oligonucleotide
  Antisense strand to SEQ ID NO: 2576124
aaucauauucgguugccaa

SEQ ID NO: 2576126 - RNA, 19 nt, Artificial Sequence
  Description of Artificial Sequence: Synthetic oligonucleotide
  Sense strand starting at position 886 of SEQ ID NO: 1889054
ggagauuacugagcucaga

SEQ ID NO: 2576127 - RNA, 19 nt, Artificial Sequence
  Description of Artificial Sequence: Synthetic oligonucleotide
  Antisense strand to SEQ ID NO: 2576126
ucugagcucaguaaucucc

SEQ ID NO: 2576128 - RNA, 19 nt, Artificial Sequence
  Description of Artificial Sequence: Synthetic oligonucleotide
  Sense strand starting at position 1079 of SEQ ID NO: 1889054
ccuaauaaaugggauagaa

SEQ ID NO: 2576129 - RNA, 19 nt, Artificial Sequence
  Description of Artificial Sequence: Synthetic oligonucleotide
  Antisense strand to SEQ ID NO: 2576128
uucuaucccauuuauuagg

SEQ ID NO: 2576130 - RNA, 19 nt, Artificial Sequence
  Description of Artificial Sequence: Synthetic oligonucleotide
  Sense strand starting at position 1166 of SEQ ID NO: 1889054
acgacaaagucucuaccau

SEQ ID NO: 2576131 - RNA, 19 nt, Artificial Sequence
  Description of Artificial Sequence: Synthetic oligonucleotide
  Antisense strand to SEQ ID NO: 2576130
augguagagacuuugucgu

SEQ ID NO: 2576132 - RNA, 19 nt, Artificial Sequence
  Description of Artificial Sequence: Synthetic oligonucleotide
  Sense strand starting at position 1167 of SEQ ID NO: 1889054
cgacaaagucucuaccauc

SEQ ID NO: 2576133 - RNA, 19 nt, Artificial Sequence
  Description of Artificial Sequence: Synthetic oligonucleotide
  Antisense strand to SEQ ID NO: 2576132
gaugguagagacuuugucg

SEQ ID NO: 2576134 - RNA, 19 nt, Artificial Sequence
  Description of Artificial Sequence: Synthetic oligonucleotide
  Sense strand starting at position 1391 of SEQ ID NO: 1889054
guaacaucuccagaauguu

SEQ ID NO: 2576135 - RNA, 19 nt, Artificial Sequence
  Description of Artificial Sequence: Synthetic oligonucleotide
  Antisense strand to SEQ ID NO: 2576134
aacauucuggagauguuac

SEQ ID NO: 2576136 - RNA, 19 nt, Artificial Sequence
  Description of Artificial Sequence: Synthetic oligonucleotide
  Sense strand starting at position 1653 of SEQ ID NO: 1889054
cugguucugacuugagaag

SEQ ID NO: 2576137 - RNA, 19 nt, Artificial Sequence
  Description of Artificial Sequence: Synthetic oligonucleotide
  Antisense strand to SEQ ID NO: 2576136
cuucucaagucagaaccag

SEQ ID NO: 2576138 - RNA, 19 nt, Artificial Sequence
  Description of Artificial Sequence: Synthetic oligonucleotide
  Sense strand starting at position 2070 of SEQ ID NO: 1889054
gggaggaagugcuugggaa

SEQ ID NO: 2576139 - RNA, 19 nt, Artificial Sequence
  Description of Artificial Sequence: Synthetic oligonucleotide
  Antisense strand to SEQ ID NO: 2576138
uucccaagcacuuccuccc

SEQ ID NO: 2576140 - RNA, 19 nt, Artificial Sequence
  Description of Artificial Sequence: Synthetic oligonucleotide
  Sense strand starting at position 2071 of SEQ ID NO: 1889054
ggaggaagugcuugggaaa

SEQ ID NO: 2576141 - RNA, 19 nt, Artificial Sequence
  Description of Artificial Sequence: Synthetic oligonucleotide
  Antisense strand to SEQ ID NO: 2576140
uuucccaagcacuuccucc

SEQ ID NO: 2576142 - RNA, 19 nt, Artificial Sequence
  Description of Artificial Sequence: Synthetic oligonucleotide
  Sense strand starting at position 2072 of SEQ ID NO: 1889054
gaggaagugcuugggaaag

SEQ ID NO: 2576143 - RNA, 19 nt, Artificial Sequence
  Description of Artificial Sequence: Synthetic oligonucleotide
  Antisense strand to SEQ ID NO: 2576142
cuuucccaagcacuuccuc

SEQ ID NO: 2576144 - RNA, 19 nt, Artificial Sequence
  Description of Artificial Sequence: Synthetic oligonucleotide
  Sense strand starting at position 2132 of SEQ ID NO: 1889054
caagguguguauguacaga

SEQ ID NO: 2576145 - RNA, 19 nt, Artificial Sequence
  Description of Artificial Sequence: Synthetic oligonucleotide
  Antisense strand to SEQ ID NO: 2576144
ucuguacauacacaccuug

SEQ ID NO: 2576146 - RNA, 19 nt, Artificial Sequence
  Description of Artificial Sequence: Synthetic oligonucleotide
  Sense strand starting at position 2137 of SEQ ID NO: 1889054
uguguauguacagauguga

SEQ ID NO: 2576147 - RNA, 19 nt, Artificial Sequence
  Description of Artificial Sequence: Synthetic oligonucleotide
  Antisense strand to SEQ ID NO: 2576146
ucacaucuguacauacaca

SEQ ID NO: 2576148 - RNA, 19 nt, Artificial Sequence
  Description of Artificial Sequence: Synthetic oligonucleotide
  Sense strand starting at position 2154 of SEQ ID NO: 1889054
gauccuguacgacauacaa

SEQ ID NO: 2576149 - RNA, 19 nt, Artificial Sequence
  Description of Artificial Sequence: Synthetic oligonucleotide
  Antisense strand to SEQ ID NO: 2576148
uuguaugucguacaggauc

SEQ ID NO: 2576150 - RNA, 19 nt, Artificial Sequence
  Description of Artificial Sequence: Synthetic oligonucleotide
  Sense strand starting at position 2180 of SEQ ID NO: 1889054
ugagaacugcacugaguaa

SEQ ID NO: 2576151 - RNA, 19 nt, Artificial Sequence
  Description of Artificial Sequence: Synthetic oligonucleotide
  Antisense strand to SEQ ID NO: 2576150
uuacucagugcaguucuca

SEQ ID NO: 2576152 - RNA, 19 nt, Artificial Sequence
  Description of Artificial Sequence: Synthetic oligonucleotide
  Sense strand starting at position 2228 of SEQ ID NO: 1889054
gcugaucaugcuuaacaga

SEQ ID NO: 2576153 - RNA, 19 nt, Artificial Sequence
  Description of Artificial Sequence: Synthetic oligonucleotide
  Antisense strand to SEQ ID NO: 2576152
ucuguuaagcaugaucagc

SEQ ID NO: 2576154 - RNA, 19 nt, Artificial Sequence
  Description of Artificial Sequence: Synthetic oligonucleotide
  Sense strand starting at position 2258 of SEQ ID NO: 1889054
uugcaaaggcuuugaaaug

SEQ ID NO: 2576155 - RNA, 19 nt, Artificial Sequence
  Description of Artificial Sequence: Synthetic oligonucleotide
  Antisense strand to SEQ ID NO: 2576154
cauuucaaagccuuugcaa

SEQ ID NO: 2576156 - RNA, 19 nt, Artificial Sequence
  Description of Artificial Sequence: Synthetic oligonucleotide
  Sense strand starting at position 2704 of SEQ ID NO: 1889054
gcauaacacuucucaagug

SEQ ID NO: 2576157 - RNA, 19 nt, Artificial Sequence
  Description of Artificial Sequence: Synthetic oligonucleotide
  Antisense strand to SEQ ID NO: 2576156
cacuugagaaguguuaugc

SEQ ID NO: 2576158 - RNA, 19 nt, Artificial Sequence
  Description of Artificial Sequence: Synthetic oligonucleotide
  Sense strand starting at position 2709 of SEQ ID NO: 1889054
acacuucucaaguggcgaa

SEQ ID NO: 2576159 - RNA, 19 nt, Artificial Sequence
  Description of Artificial Sequence: Synthetic oligonucleotide
  Antisense strand to SEQ ID NO: 2576158
uucgccacuugagaagugu

SEQ ID NO: 2576160 - RNA, 19 nt, Artificial Sequence
  Description of Artificial Sequence: Synthetic oligonucleotide
  Sense strand starting at position 2816 of SEQ ID NO: 1889054
gagagauuguugccaucag

SEQ ID NO: 2576161 - RNA, 19 nt, Artificial Sequence
  Description of Artificial Sequence: Synthetic oligonucleotide
  Antisense strand to SEQ ID NO: 2576160
cugauggcaacaaucucuc

SEQ ID NO: 2576162 - RNA, 19 nt, Artificial Sequence
  Description of Artificial Sequence: Synthetic oligonucleotide
  Sense strand starting at position 2820 of SEQ ID NO: 1889054
gauuguugccaucagaccu

SEQ ID NO: 2576163 - RNA, 19 nt, Artificial Sequence
  Description of Artificial Sequence: Synthetic oligonucleotide
  Antisense strand to SEQ ID NO: 2576162
aggucugauggcaacaauc

SEQ ID NO: 2576164 - RNA, 19 nt, Artificial Sequence
  Description of Artificial Sequence: Synthetic oligonucleotide
  Sense strand starting at position 2859 of SEQ ID NO: 1889054
agaagcuuccugcaugaga

SEQ ID NO: 2576165 - RNA, 19 nt, Artificial Sequence
  Description of Artificial Sequence: Synthetic oligonucleotide
  Antisense strand to SEQ ID NO: 2576164
ucucaugcaggaagcuucu

SEQ ID NO: 2576166 - RNA, 19 nt, Artificial Sequence
  Description of Artificial Sequence: Synthetic oligonucleotide
  Sense strand starting at position 2909 of SEQ ID NO: 1889054
gcaugaccugcucaccaau

SEQ ID NO: 2576167 - RNA, 19 nt, Artificial Sequence
  Description of Artificial Sequence: Synthetic oligonucleotide
  Antisense strand to SEQ ID NO: 2576166
auuggugagcaggucaugc

SEQ ID NO: 2576168 - RNA, 19 nt, Artificial Sequence
  Description of Artificial Sequence: Synthetic oligonucleotide
  Sense strand starting at position 2970 of SEQ ID NO: 1889054
agauaugucuuagaauuuc

SEQ ID NO: 2576169 - RNA, 19 nt, Artificial Sequence
  Description of Artificial Sequence: Synthetic oligonucleotide
  Antisense strand to SEQ ID NO: 2576168
gaaauucuaagacauaucu

SEQ ID NO: 2576170 - RNA, 19 nt, Artificial Sequence
  Description of Artificial Sequence: Synthetic oligonucleotide
  Sense strand starting at position 3079 of SEQ ID NO: 1889054
uugcuuaacucagugaaca

SEQ ID NO: 2576171 - RNA, 19 nt, Artificial Sequence
  Description of Artificial Sequence: Synthetic oligonucleotide
  Antisense strand to SEQ ID NO: 2576170
uguucacugaguuaagcaa

SEQ ID NO: 2576172 - RNA, 19 nt, Artificial Sequence
  Description of Artificial Sequence: Synthetic oligonucleotide
  Sense strand starting at position 3080 of SEQ ID NO: 1889054
ugcuuaacucagugaacag

SEQ ID NO: 2576173 - RNA, 19 nt, Artificial Sequence
  Description of Artificial Sequence: Synthetic oligonucleotide
  Antisense strand to SEQ ID NO: 2576172
cuguucacugaguuaagca

SEQ ID NO: 2576174 - RNA, 19 nt, Artificial Sequence
  Description of Artificial Sequence: Synthetic oligonucleotide
  Sense strand starting at position 3240 of SEQ ID NO: 1889054
ccaacuuuaucuguggaga

SEQ ID NO: 2576175 - RNA, 19 nt, Artificial Sequence
  Description of Artificial Sequence: Synthetic oligonucleotide
  Antisense strand to SEQ ID NO: 2576174
ucuccacagauaaaguugg

SEQ ID NO: 2576176 - RNA, 19 nt, Artificial Sequence
  Description of Artificial Sequence: Synthetic oligonucleotide
  Sense strand starting at position 3241 of SEQ ID NO: 1889054
caacuuuaucuguggagac

SEQ ID NO: 2576177 - RNA, 19 nt, Artificial Sequence
  Description of Artificial Sequence: Synthetic oligonucleotide
  Antisense strand to SEQ ID NO: 2576176
gucuccacagauaaaguug

SEQ ID NO: 2576178 - RNA, 19 nt, Artificial Sequence
  Description of Artificial Sequence: Synthetic oligonucleotide
  Sense strand starting at position 3468 of SEQ ID NO: 1889054
cuggauaucccacaggcau

SEQ ID NO: 2576179 - RNA, 19 nt, Artificial Sequence
  Description of Artificial Sequence: Synthetic oligonucleotide
  Antisense strand to SEQ ID NO: 2576178
augccugugggauauccag

SEQ ID NO: 2576180 - RNA, 19 nt, Artificial Sequence
  Description of Artificial Sequence: Synthetic oligonucleotide
  Sense strand starting at position 3605 of SEQ ID NO: 1889054
ggagucaugcuagagcuuu

SEQ ID NO: 2576181 - RNA, 19 nt, Artificial Sequence
  Description of Artificial Sequence: Synthetic oligonucleotide
  Antisense strand to SEQ ID NO: 2576180
aaagcucuagcaugacucc

SEQ ID NO: 2576182 - RNA, 19 nt, Artificial Sequence
  Description of Artificial Sequence: Synthetic oligonucleotide
  Sense strand starting at position 15 of SEQ ID NO: 1889055
gccauuuggccucgcuaaa

SEQ ID NO: 2576183 - RNA, 19 nt, Artificial Sequence
  Description of Artificial Sequence: Synthetic oligonucleotide
  Antisense strand to SEQ ID NO: 2576182
uuuagcgaggccaaauggc

SEQ ID NO: 2576184 - RNA, 19 nt, Artificial Sequence
  Description of Artificial Sequence: Synthetic oligonucleotide
  Sense strand starting at position 63 of SEQ ID NO: 1889055
uccucugagcagugguuaa

SEQ ID NO: 2576185 - RNA, 19 nt, Artificial Sequence
  Description of Artificial Sequence: Synthetic oligonucleotide
  Antisense strand to SEQ ID NO: 2576184
uuaaccacugcucagagga

SEQ ID NO: 2576186 - RNA, 19 nt, Artificial Sequence
  Description of Artificial Sequence: Synthetic oligonucleotide
  Sense strand starting at position 67 of SEQ ID NO: 1889055
cugagcagugguuaauuaa

SEQ ID NO: 2576187 - RNA, 19 nt, Artificial Sequence
  Description of Artificial Sequence: Synthetic oligonucleotide
  Antisense strand to SEQ ID NO: 2576186
uuaauuaaccacugcucag

SEQ ID NO: 2576188 - RNA, 19 nt, Artificial Sequence
  Description of Artificial Sequence: Synthetic oligonucleotide
  Sense strand starting at position 109 of SEQ ID NO: 1889055
aauagagucaggcagguuu

SEQ ID NO: 2576189 - RNA, 19 nt, Artificial Sequence
  Description of Artificial Sequence: Synthetic oligonucleotide
  Antisense strand to SEQ ID NO: 2576188
aaaccugccugacucuauu

SEQ ID NO: 2576190 - RNA, 19 nt, Artificial Sequence
  Description of Artificial Sequence: Synthetic oligonucleotide
  Sense strand starting at position 154 of SEQ ID NO: 1889055
ggaggacugagacgaguua

SEQ ID NO: 2576191 - RNA, 19 nt, Artificial Sequence
  Description of Artificial Sequence: Synthetic oligonucleotide
  Antisense strand to SEQ ID NO: 2576190
uaacucgucucaguccucc

SEQ ID NO: 2576192 - RNA, 19 nt, Artificial Sequence
  Description of Artificial Sequence: Synthetic oligonucleotide
  Sense strand starting at position 165 of SEQ ID NO: 1889055
acgaguuaggcagggaauu

SEQ ID NO: 2576193 - RNA, 19 nt, Artificial Sequence
  Description of Artificial Sequence: Synthetic oligonucleotide
  Antisense strand to SEQ ID NO: 2576192
aauucccugccuaacucgu

SEQ ID NO: 2576194 - RNA, 19 nt, Artificial Sequence
  Description of Artificial Sequence: Synthetic oligonucleotide
  Sense strand starting at position 166 of SEQ ID NO: 1889055
cgaguuaggcagggaauua

SEQ ID NO: 2576195 - RNA, 19 nt, Artificial Sequence
  Description of Artificial Sequence: Synthetic oligonucleotide
  Antisense strand to SEQ ID NO: 2576194
uaauucccugccuaacucg

SEQ ID NO: 2576196 - RNA, 19 nt, Artificial Sequence
  Description of Artificial Sequence: Synthetic oligonucleotide
  Sense strand starting at position 423 of SEQ ID NO: 1889055
gggagucucauguaaccuu

SEQ ID NO: 2576197 - RNA, 19 nt, Artificial Sequence
  Description of Artificial Sequence: Synthetic oligonucleotide
  Antisense strand to SEQ ID NO: 2576196
aagguuacaugagacuccc

SEQ ID NO: 2576198 - RNA, 19 nt, Artificial Sequence
  Description of Artificial Sequence: Synthetic oligonucleotide
  Sense strand starting at position 487 of SEQ ID NO: 1889055
caggccaucugguuuccaa

SEQ ID NO: 2576199 - RNA, 19 nt, Artificial Sequence
  Description of Artificial Sequence: Synthetic oligonucleotide
  Antisense strand to SEQ ID NO: 2576198
uuggaaaccagauggccug

SEQ ID NO: 2576200 - RNA, 19 nt, Artificial Sequence
  Description of Artificial Sequence: Synthetic oligonucleotide
  Sense strand starting at position 525 of SEQ ID NO: 1889055
ccgagagagucaguucuac

SEQ ID NO: 2576201 - RNA, 19 nt, Artificial Sequence
  Description of Artificial Sequence: Synthetic oligonucleotide
  Antisense strand to SEQ ID NO: 2576200
guagaacugacucucucgg

SEQ ID NO: 2576202 - RNA, 19 nt, Artificial Sequence
  Description of Artificial Sequence: Synthetic oligonucleotide
  Sense strand starting at position 669 of SEQ ID NO: 1889055
cgcgcaugcgccuugguaa

SEQ ID NO: 2576203 - RNA, 19 nt, Artificial Sequence
  Description of Artificial Sequence: Synthetic oligonucleotide
  Antisense strand to SEQ ID NO: 2576202
uuaccaaggcgcaugcgcg

SEQ ID NO: 2576204 - RNA, 19 nt, Artificial Sequence
  Description of Artificial Sequence: Synthetic oligonucleotide
  Sense strand starting at position 670 of SEQ ID NO: 1889055
gcgcaugcgccuugguaaa

SEQ ID NO: 2576205 - RNA, 19 nt, Artificial Sequence
  Description of Artificial Sequence: Synthetic oligonucleotide
  Antisense strand to SEQ ID NO: 2576204
uuuaccaaggcgcaugcgc

SEQ ID NO: 2576206 - RNA, 19 nt, Artificial Sequence
  Description of Artificial Sequence: Synthetic oligonucleotide
  Sense strand starting at position 1110 of SEQ ID NO: 1889055
guaugaaccuucuguguau

SEQ ID NO: 2576207 - RNA, 19 nt, Artificial Sequence
  Description of Artificial Sequence: Synthetic oligonucleotide
  Antisense strand to SEQ ID NO: 2576206
auacacagaagguucauac

SEQ ID NO: 2576208 - RNA, 19 nt, Artificial Sequence
  Description of Artificial Sequence: Synthetic oligonucleotide
  Sense strand starting at position 1123 of SEQ ID NO: 1889055
guguauuccuguucucaaa

SEQ ID NO: 2576209 - RNA, 19 nt, Artificial Sequence
  Description of Artificial Sequence: Synthetic oligonucleotide
  Antisense strand to SEQ ID NO: 2576208
uuugagaacaggaauacac

SEQ ID NO: 2576210 - RNA, 19 nt, Artificial Sequence
  Description of Artificial Sequence: Synthetic oligonucleotide
  Sense strand starting at position 1196 of SEQ ID NO: 1889055
ccuccuuucuccugucuga

SEQ ID NO: 2576211 - RNA, 19 nt, Artificial Sequence
  Description of Artificial Sequence: Synthetic oligonucleotide
  Antisense strand to SEQ ID NO: 2576210
ucagacaggagaaaggagg

SEQ ID NO: 2576212 - RNA, 19 nt, Artificial Sequence
  Description of Artificial Sequence: Synthetic oligonucleotide
  Sense strand starting at position 1219 of SEQ ID NO: 1889055
gguccuuuccguugcucaa

SEQ ID NO: 2576213 - RNA, 19 nt, Artificial Sequence
  Description of Artificial Sequence: Synthetic oligonucleotide
  Antisense strand to SEQ ID NO: 2576212
uugagcaacggaaaggacc

SEQ ID NO: 2576214 - RNA, 19 nt, Artificial Sequence
  Description of Artificial Sequence: Synthetic oligonucleotide
  Sense strand starting at position 1380 of SEQ ID NO: 1889055
uugcuaccgucugaaggau

SEQ ID NO: 2576215 - RNA, 19 nt, Artificial Sequence
  Description of Artificial Sequence: Synthetic oligonucleotide
  Antisense strand to SEQ ID NO: 2576214
auccuucagacgguagcaa

SEQ ID NO: 2576216 - RNA, 19 nt, Artificial Sequence
  Description of Artificial Sequence: Synthetic oligonucleotide
  Sense strand starting at position 1463 of SEQ ID NO: 1889055
gaguccagaucguuacuuu

SEQ ID NO: 2576217 - RNA, 19 nt, Artificial Sequence
  Description of Artificial Sequence: Synthetic oligonucleotide
  Antisense strand to SEQ ID NO: 2576216
aaaguaacgaucuggacuc

SEQ ID NO: 2576218 - RNA, 19 nt, Artificial Sequence
  Description of Artificial Sequence: Synthetic oligonucleotide
  Sense strand starting at position 1474 of SEQ ID NO: 1889055
guuacuuucuguggcccaa

SEQ ID NO: 2576219 - RNA, 19 nt, Artificial Sequence
  Description of Artificial Sequence: Synthetic oligonucleotide
  Antisense strand to SEQ ID NO: 2576218
uugggccacagaaaguaac

SEQ ID NO: 2576220 - RNA, 19 nt, Artificial Sequence
  Description of Artificial Sequence: Synthetic oligonucleotide
  Sense strand starting at position 1560 of SEQ ID NO: 1889055
gcgguuaggucccaaaccu

SEQ ID NO: 2576221 - RNA, 19 nt, Artificial Sequence
  Description of Artificial Sequence: Synthetic oligonucleotide
  Antisense strand to SEQ ID NO: 2576220
agguuugggaccuaaccgc

SEQ ID NO: 2576222 - RNA, 19 nt, Artificial Sequence
  Description of Artificial Sequence: Synthetic oligonucleotide
  Sense strand starting at position 1984 of SEQ ID NO: 1889055
ggaggaauguaguucucug

SEQ ID NO: 2576223 - RNA, 19 nt, Artificial Sequence
  Description of Artificial Sequence: Synthetic oligonucleotide
  Antisense strand to SEQ ID NO: 2576222
cagagaacuacauuccucc

SEQ ID NO: 2576224 - RNA, 19 nt, Artificial Sequence
  Description of Artificial Sequence: Synthetic oligonucleotide
  Sense strand starting at position 1988 of SEQ ID NO: 1889055
gaauguaguucucugaacu

SEQ ID NO: 2576225 - RNA, 19 nt, Artificial Sequence
  Description of Artificial Sequence: Synthetic oligonucleotide
  Antisense strand to SEQ ID NO: 2576224
aguucagagaacuacauuc

SEQ ID NO: 2576226 - RNA, 19 nt, Artificial Sequence
  Description of Artificial Sequence: Synthetic oligonucleotide
  Sense strand starting at position 2058 of SEQ ID NO: 1889055
guuguuauaccuugugucu

SEQ ID NO: 2576227 - RNA, 19 nt, Artificial Sequence
  Description of Artificial Sequence: Synthetic oligonucleotide
  Antisense strand to SEQ ID NO: 2576226
agacacaagguauaacaac

SEQ ID NO: 2576228 - RNA, 19 nt, Artificial Sequence
  Description of Artificial Sequence: Synthetic oligonucleotide
  Sense strand starting at position 2060 of SEQ ID NO: 1889055
uguuauaccuugugucuau

SEQ ID NO: 2576229 - RNA, 19 nt, Artificial Sequence
  Description of Artificial Sequence: Synthetic oligonucleotide
  Antisense strand to SEQ ID NO: 2576228
auagacacaagguauaaca

SEQ ID NO: 2576230 - RNA, 19 nt, Artificial Sequence
  Description of Artificial Sequence: Synthetic oligonucleotide
  Sense strand starting at position 2192 of SEQ ID NO: 1889055
gcccguccaucuuaugcaa

SEQ ID NO: 2576231 - RNA, 19 nt, Artificial Sequence
  Description of Artificial Sequence: Synthetic oligonucleotide
  Antisense strand to SEQ ID NO: 2576230
uugcauaagauggacgggc

SEQ ID NO: 2576232 - RNA, 19 nt, Artificial Sequence
  Description of Artificial Sequence: Synthetic oligonucleotide
  Sense strand starting at position 2194 of SEQ ID NO: 1889055
ccguccaucuuaugcaauu

SEQ ID NO: 2576233 - RNA, 19 nt, Artificial Sequence
  Description of Artificial Sequence: Synthetic oligonucleotide
  Antisense strand to SEQ ID NO: 2576232
aauugcauaagauggacgg

SEQ ID NO: 2576234 - RNA, 19 nt, Artificial Sequence
  Description of Artificial Sequence: Synthetic oligonucleotide
  Sense strand starting at position 2288 of SEQ ID NO: 1889055
acaauaucaguuuguacuu

SEQ ID NO: 2576235 - RNA, 19 nt, Artificial Sequence
  Description of Artificial Sequence: Synthetic oligonucleotide
  Antisense strand to SEQ ID NO: 2576234
aaguacaaacugauauugu

SEQ ID NO: 2576236 - RNA, 19 nt, Artificial Sequence
  Description of Artificial Sequence: Synthetic oligonucleotide
  Sense strand starting at position 2304 of SEQ ID NO: 1889055
cuuagacugucucuuguga

SEQ ID NO: 2576237 - RNA, 19 nt, Artificial Sequence
  Description of Artificial Sequence: Synthetic oligonucleotide
  Antisense strand to SEQ ID NO: 2576236
ucacaagagacagucuaag

SEQ ID NO: 2576238 - RNA, 19 nt, Artificial Sequence
  Description of Artificial Sequence: Synthetic oligonucleotide
  Sense strand starting at position 2306 of SEQ ID NO: 1889055
uagacugucucuugugaca

SEQ ID NO: 2576239 - RNA, 19 nt, Artificial Sequence
  Description of Artificial Sequence: Synthetic oligonucleotide
  Antisense strand to SEQ ID NO: 2576238
ugucacaagagacagucua

SEQ ID NO: 2576240 - RNA, 19 nt, Artificial Sequence
  Description of Artificial Sequence: Synthetic oligonucleotide
  Sense strand starting at position 2308 of SEQ ID NO: 1889055
gacugucucuugugacaug

SEQ ID NO: 2576241 - RNA, 19 nt, Artificial Sequence
  Description of Artificial Sequence: Synthetic oligonucleotide
  Antisense strand to SEQ ID NO: 2576240
caugucacaagagacaguc

SEQ ID NO: 2576242 - RNA, 19 nt, Artificial Sequence
  Description of Artificial Sequence: Synthetic oligonucleotide
  Sense strand starting at position 2491 of SEQ ID NO: 1889055
caucgugaauaucgaauaa

SEQ ID NO: 2576243 - RNA, 19 nt, Artificial Sequence
  Description of Artificial Sequence: Synthetic oligonucleotide
  Antisense strand to SEQ ID NO: 2576242
uuauucgauauucacgaug

SEQ ID NO: 2576244 - RNA, 19 nt, Artificial Sequence
  Description of Artificial Sequence: Synthetic oligonucleotide
  Sense strand starting at position 2585 of SEQ ID NO: 1889055
ggagaaguagacugcaaua

SEQ ID NO: 2576245 - RNA, 19 nt, Artificial Sequence
  Description of Artificial Sequence: Synthetic oligonucleotide
  Antisense strand to SEQ ID NO: 2576244
uauugcagucuacuucucc

SEQ ID NO: 2576246 - RNA, 19 nt, Artificial Sequence
  Description of Artificial Sequence: Synthetic oligonucleotide
  Sense strand starting at position 2781 of SEQ ID NO: 1889055
gaucauaaguuaggccaaa

SEQ ID NO: 2576247 - RNA, 19 nt, Artificial Sequence
  Description of Artificial Sequence: Synthetic oligonucleotide
  Antisense strand to SEQ ID NO: 2576246
uuuggccuaacuuaugauc

SEQ ID NO: 2576248 - RNA, 19 nt, Artificial Sequence
  Description of Artificial Sequence: Synthetic oligonucleotide
  Sense strand starting at position 3711 of SEQ ID NO: 1889055
auguuagcccuuugucuga

SEQ ID NO: 2576249 - RNA, 19 nt, Artificial Sequence
  Description of Artificial Sequence: Synthetic oligonucleotide
  Antisense strand to SEQ ID NO: 2576248
ucagacaaagggcuaacau

SEQ ID NO: 2576250 - RNA, 19 nt, Artificial Sequence
  Description of Artificial Sequence: Synthetic oligonucleotide
  Sense strand starting at position 1998 of SEQ ID NO: 1889056
uuuaaaugguuggaagaaa

SEQ ID NO: 2576251 - RNA, 19 nt, Artificial Sequence
  Description of Artificial Sequence: Synthetic oligonucleotide
  Antisense strand to SEQ ID NO: 2576250
uuucuuccaaccauuuaaa

SEQ ID NO: 2576252 - RNA, 19 nt, Artificial Sequence
  Description of Artificial Sequence: Synthetic oligonucleotide
  Sense strand starting at position 2207 of SEQ ID NO: 1889056
ucaggcccuuuauaagaaa

SEQ ID NO: 2576253 - RNA, 19 nt, Artificial Sequence
  Description of Artificial Sequence: Synthetic oligonucleotide
  Antisense strand to SEQ ID NO: 2576252
uuucuuauaaagggccuga

SEQ ID NO: 2576254 - RNA, 19 nt, Artificial Sequence
  Description of Artificial Sequence: Synthetic oligonucleotide
  Sense strand starting at position 2235 of SEQ ID NO: 1889056
acuccuuggcuggaguaua

SEQ ID NO: 2576255 - RNA, 19 nt, Artificial Sequence
  Description of Artificial Sequence: Synthetic oligonucleotide
  Antisense strand to SEQ ID NO: 2576254
uauacuccagccaaggagu

SEQ ID NO: 2576256 - RNA, 19 nt, Artificial Sequence
  Description of Artificial Sequence: Synthetic oligonucleotide
  Sense strand starting at position 2266 of SEQ ID NO: 1889056
aauggcaugagauguguuu

SEQ ID NO: 2576257 - RNA, 19 nt, Artificial Sequence
  Description of Artificial Sequence: Synthetic oligonucleotide
  Antisense strand to SEQ ID NO: 2576256
aaacacaucucaugccauu

SEQ ID NO: 2576258 - RNA, 19 nt, Artificial Sequence
  Description of Artificial Sequence: Synthetic oligonucleotide
  Sense strand starting at position 2268 of SEQ ID NO: 1889056
uggcaugagauguguuuga

SEQ ID NO: 2576259 - RNA, 19 nt, Artificial Sequence
  Description of Artificial Sequence: Synthetic oligonucleotide
  Antisense strand to SEQ ID NO: 2576258
ucaaacacaucucaugcca

SEQ ID NO: 2576260 - RNA, 19 nt, Artificial Sequence
  Description of Artificial Sequence: Synthetic oligonucleotide
  Sense strand starting at position 2374 of SEQ ID NO: 1889056
aaguuugauguaugauuag

SEQ ID NO: 2576261 - RNA, 19 nt, Artificial Sequence
  Description of Artificial Sequence: Synthetic oligonucleotide
  Antisense strand to SEQ ID NO: 2576260
cuaaucauacaucaaacuu

SEQ ID NO: 2576262 - RNA, 19 nt, Artificial Sequence
  Description of Artificial Sequence: Synthetic oligonucleotide
  Sense strand starting at position 2380 of SEQ ID NO: 1889056
gauguaugauuagaaacca

SEQ ID NO: 2576263 - RNA, 19 nt, Artificial Sequence
  Description of Artificial Sequence: Synthetic oligonucleotide
  Antisense strand to SEQ ID NO: 2576262
ugguuucuaaucauacauc

SEQ ID NO: 2576264 - RNA, 19 nt, Artificial Sequence
  Description of Artificial Sequence: Synthetic oligonucleotide
  Sense strand starting at position 2415 of SEQ ID NO: 1889056
aaaggaguguuaugaucca

SEQ ID NO: 2576265 - RNA, 19 nt, Artificial Sequence
  Description of Artificial Sequence: Synthetic oligonucleotide
  Antisense strand to SEQ ID NO: 2576264
uggaucauaacacuccuuu

SEQ ID NO: 2576266 - RNA, 19 nt, Artificial Sequence
  Description of Artificial Sequence: Synthetic oligonucleotide
  Sense strand starting at position 2443 of SEQ ID NO: 1889056
ucagaaagguuauuaugac

SEQ ID NO: 2576267 - RNA, 19 nt, Artificial Sequence
  Description of Artificial Sequence: Synthetic oligonucleotide
  Antisense strand to SEQ ID NO: 2576266
gucauaauaaccuuucuga

SEQ ID NO: 2576268 - RNA, 19 nt, Artificial Sequence
  Description of Artificial Sequence: Synthetic oligonucleotide
  Sense strand starting at position 2444 of SEQ ID NO: 1889056
cagaaagguuauuaugaca

SEQ ID NO: 2576269 - RNA, 19 nt, Artificial Sequence
  Description of Artificial Sequence: Synthetic oligonucleotide
  Antisense strand to SEQ ID NO: 2576268
ugucauaauaaccuuucug

SEQ ID NO: 2576270 - RNA, 19 nt, Artificial Sequence
  Description of Artificial Sequence: Synthetic oligonucleotide
  Sense strand starting at position 2464 of SEQ ID NO: 1889056
uuggcuuugggucagaaug

SEQ ID NO: 2576271 - RNA, 19 nt, Artificial Sequence
  Description of Artificial Sequence: Synthetic oligonucleotide
  Antisense strand to SEQ ID NO: 2576270
cauucugacccaaagccaa

SEQ ID NO: 2576272 - RNA, 19 nt, Artificial Sequence
  Description of Artificial Sequence: Synthetic oligonucleotide
  Sense strand starting at position 2466 of SEQ ID NO: 1889056
ggcuuugggucagaaugua

SEQ ID NO: 2576273 - RNA, 19 nt, Artificial Sequence
  Description of Artificial Sequence: Synthetic oligonucleotide
  Antisense strand to SEQ ID NO: 2576272
uacauucugacccaaagcc

SEQ ID NO: 2576274 - RNA, 19 nt, Artificial Sequence
  Description of Artificial Sequence: Synthetic oligonucleotide
  Sense strand starting at position 2926 of SEQ ID NO: 1889056
aacgcaguguccuccacau

SEQ ID NO: 2576275 - RNA, 19 nt, Artificial Sequence
  Description of Artificial Sequence: Synthetic oligonucleotide
  Antisense strand to SEQ ID NO: 2576274
auguggaggacacugcguu

SEQ ID NO: 2576276 - RNA, 19 nt, Artificial Sequence
  Description of Artificial Sequence: Synthetic oligonucleotide
  Sense strand starting at position 2928 of SEQ ID NO: 1889056
cgcaguguccuccacauaa

SEQ ID NO: 2576277 - RNA, 19 nt, Artificial Sequence
  Description of Artificial Sequence: Synthetic oligonucleotide
  Antisense strand to SEQ ID NO: 2576276
uuauguggaggacacugcg

SEQ ID NO: 2576278 - RNA, 19 nt, Artificial Sequence
  Description of Artificial Sequence: Synthetic oligonucleotide
  Sense strand starting at position 3203 of SEQ ID NO: 1889056
ugcaguuguggugagccaa

SEQ ID NO: 2576279 - RNA, 19 nt, Artificial Sequence
  Description of Artificial Sequence: Synthetic oligonucleotide
  Antisense strand to SEQ ID NO: 2576278
uuggcucaccacaacugca

SEQ ID NO: 2576280 - RNA, 19 nt, Artificial Sequence
  Description of Artificial Sequence: Synthetic oligonucleotide
  Sense strand starting at position 3288 of SEQ ID NO: 1889056
ccuugaauuuauugaagag

SEQ ID NO: 2576281 - RNA, 19 nt, Artificial Sequence
  Description of Artificial Sequence: Synthetic oligonucleotide
  Antisense strand to SEQ ID NO: 2576280
cucuucaauaaauucaagg

SEQ ID NO: 2576282 - RNA, 19 nt, Artificial Sequence
  Description of Artificial Sequence: Synthetic oligonucleotide
  Sense strand starting at position 3332 of SEQ ID NO: 1889056
ccugaacucuaaggaaaga

SEQ ID NO: 2576283 - RNA, 19 nt, Artificial Sequence
  Description of Artificial Sequence: Synthetic oligonucleotide
  Antisense strand to SEQ ID NO: 2576282
ucuuuccuuagaguucagg

SEQ ID NO: 2576284 - RNA, 19 nt, Artificial Sequence
  Description of Artificial Sequence: Synthetic oligonucleotide
  Sense strand starting at position 3384 of SEQ ID NO: 1889056
cuggcucaccugugucaau

SEQ ID NO: 2576285 - RNA, 19 nt, Artificial Sequence
  Description of Artificial Sequence: Synthetic oligonucleotide
  Antisense strand to SEQ ID NO: 2576284
auugacacaggugagccag

SEQ ID NO: 2576286 - RNA, 19 nt, Artificial Sequence
  Description of Artificial Sequence: Synthetic oligonucleotide
  Sense strand starting at position 3391 of SEQ ID NO: 1889056
accugugucaaugggaaga

SEQ ID NO: 2576287 - RNA, 19 nt, Artificial Sequence
  Description of Artificial Sequence: Synthetic oligonucleotide
  Antisense strand to SEQ ID NO: 2576286
ucuucccauugacacaggu

SEQ ID NO: 2576288 - RNA, 19 nt, Artificial Sequence
  Description of Artificial Sequence: Synthetic oligonucleotide
  Sense strand starting at position 3430 of SEQ ID NO: 1889056
guaugaggaauucgauuaa

SEQ ID NO: 2576289 - RNA, 19 nt, Artificial Sequence
  Description of Artificial Sequence: Synthetic oligonucleotide
  Antisense strand to SEQ ID NO: 2576288
uuaaucgaauuccucauac

SEQ ID NO: 2576290 - RNA, 19 nt, Artificial Sequence
  Description of Artificial Sequence: Synthetic oligonucleotide
  Sense strand starting at position 3475 of SEQ ID NO: 1889056
gggcuagcaugagugcaua

SEQ ID NO: 2576291 - RNA, 19 nt, Artificial Sequence
  Description of Artificial Sequence: Synthetic oligonucleotide
  Antisense strand to SEQ ID NO: 2576290
uaugcacucaugcuagccc

SEQ ID NO: 2576292 - RNA, 19 nt, Artificial Sequence
  Description of Artificial Sequence: Synthetic oligonucleotide
  Sense strand starting at position 3727 of SEQ ID NO: 1889056
cuacccuucuaagaugagu

SEQ ID NO: 2576293 - RNA, 19 nt, Artificial Sequence
  Description of Artificial Sequence: Synthetic oligonucleotide
  Antisense strand to SEQ ID NO: 2576292
acucaucuuagaaggguag

SEQ ID NO: 2576294 - RNA, 19 nt, Artificial Sequence
  Description of Artificial Sequence: Synthetic oligonucleotide
  Sense strand starting at position 3732 of SEQ ID NO: 1889056
cuucuaagaugaguccuuu

SEQ ID NO: 2576295 - RNA, 19 nt, Artificial Sequence
  Description of Artificial Sequence: Synthetic oligonucleotide
  Antisense strand to SEQ ID NO: 2576294
aaaggacucaucuuagaag

SEQ ID NO: 2576296 - RNA, 19 nt, Artificial Sequence
  Description of Artificial Sequence: Synthetic oligonucleotide
  Sense strand starting at position 3736 of SEQ ID NO: 1889056
uaagaugaguccuuugacu

SEQ ID NO: 2576297 - RNA, 19 nt, Artificial Sequence
  Description of Artificial Sequence: Synthetic oligonucleotide
  Antisense strand to SEQ ID NO: 2576296
agucaaaggacucaucuua

SEQ ID NO: 2576298 - RNA, 19 nt, Artificial Sequence
  Description of Artificial Sequence: Synthetic oligonucleotide
  Sense strand starting at position 3781 of SEQ ID NO: 1889056
gguuaauuauccuuauguu

SEQ ID NO: 2576299 - RNA, 19 nt, Artificial Sequence
  Description of Artificial Sequence: Synthetic oligonucleotide
  Antisense strand to SEQ ID NO: 2576298
aacauaaggauaauuaacc

SEQ ID NO: 2576300 - RNA, 19 nt, Artificial Sequence
  Description of Artificial Sequence: Synthetic oligonucleotide
  Sense strand starting at position 3810 of SEQ ID NO: 1889056
cuguaagacucaugaggaa

SEQ ID NO: 2576301 - RNA, 19 nt, Artificial Sequence
  Description of Artificial Sequence: Synthetic oligonucleotide
  Antisense strand to SEQ ID NO: 2576300
uuccucaugagucuuacag

SEQ ID NO: 2576302 - RNA, 19 nt, Artificial Sequence
  Description of Artificial Sequence: Synthetic oligonucleotide
  Sense strand starting at position 3858 of SEQ ID NO: 1889056
cuugaaccauuguuugauu

SEQ ID NO: 2576303 - RNA, 19 nt, Artificial Sequence
  Description of Artificial Sequence: Synthetic oligonucleotide
  Antisense strand to SEQ ID NO: 2576302
aaucaaacaaugguucaag

SEQ ID NO: 2576304 - RNA, 19 nt, Artificial Sequence
  Description of Artificial Sequence: Synthetic oligonucleotide
  Sense strand starting at position 3863 of SEQ ID NO: 1889056
accauuguuugauucugua

SEQ ID NO: 2576305 - RNA, 19 nt, Artificial Sequence
  Description of Artificial Sequence: Synthetic oligonucleotide
  Antisense strand to SEQ ID NO: 2576304
uacagaaucaaacaauggu

SEQ ID NO: 2576306 - RNA, 19 nt, Artificial Sequence
  Description of Artificial Sequence: Synthetic oligonucleotide
  Sense strand starting at position 3866 of SEQ ID NO: 1889056
auuguuugauucuguagga

SEQ ID NO: 2576307 - RNA, 19 nt, Artificial Sequence
  Description of Artificial Sequence: Synthetic oligonucleotide
  Antisense strand to SEQ ID NO: 2576306
uccuacagaaucaaacaau

SEQ ID NO: 2576308 - RNA, 19 nt, Artificial Sequence
  Description of Artificial Sequence: Synthetic oligonucleotide
  Sense strand starting at position 3895 of SEQ ID NO: 1889056
ccaggauacccauguagaa

SEQ ID NO: 2576309 - RNA, 19 nt, Artificial Sequence
  Description of Artificial Sequence: Synthetic oligonucleotide
  Antisense strand to SEQ ID NO: 2576308
uucuacauggguauccugg

SEQ ID NO: 2576310 - RNA, 19 nt, Artificial Sequence
  Description of Artificial Sequence: Synthetic oligonucleotide
  Sense strand starting at position 3908 of SEQ ID NO: 1889056
guagaagggucccuuugaa

SEQ ID NO: 2576311 - RNA, 19 nt, Artificial Sequence
  Description of Artificial Sequence: Synthetic oligonucleotide
  Antisense strand to SEQ ID NO: 2576310
uucaaagggacccuucuac

SEQ ID NO: 2576312 - RNA, 19 nt, Artificial Sequence
  Description of Artificial Sequence: Synthetic oligonucleotide
  Sense strand starting at position 3918 of SEQ ID NO: 1889056
cccuuugaaccguagcauu

SEQ ID NO: 2576313 - RNA, 19 nt, Artificial Sequence
  Description of Artificial Sequence: Synthetic oligonucleotide
  Antisense strand to SEQ ID NO: 2576312
aaugcuacgguucaaaggg

SEQ ID NO: 2576314 - RNA, 19 nt, Artificial Sequence
  Description of Artificial Sequence: Synthetic oligonucleotide
  Sense strand starting at position 3936 of SEQ ID NO: 1889056
uuaccauggucuggguaau

SEQ ID NO: 2576315 - RNA, 19 nt, Artificial Sequence
  Description of Artificial Sequence: Synthetic oligonucleotide
  Antisense strand to SEQ ID NO: 2576314
auuacccagaccaugguaa

SEQ ID NO: 2576316 - RNA, 19 nt, Artificial Sequence
  Description of Artificial Sequence: Synthetic oligonucleotide
  Sense strand starting at position 3955 of SEQ ID NO: 1889056
gggcauauucagugggcga

SEQ ID NO: 2576317 - RNA, 19 nt, Artificial Sequence
  Description of Artificial Sequence: Synthetic oligonucleotide
  Antisense strand to SEQ ID NO: 2576316
ucgcccacugaauaugccc

SEQ ID NO: 2576318 - RNA, 19 nt, Artificial Sequence
  Description of Artificial Sequence: Synthetic oligonucleotide
  Sense strand starting at position 3957 of SEQ ID NO: 1889056
gcauauucagugggcgaau

SEQ ID NO: 2576319 - RNA, 19 nt, Artificial Sequence
  Description of Artificial Sequence: Synthetic oligonucleotide
  Antisense strand to SEQ ID NO: 2576318
auucgcccacugaauaugc

SEQ ID NO: 2576320 - RNA, 19 nt, Artificial Sequence
  Description of Artificial Sequence: Synthetic oligonucleotide
  Sense strand starting at position 3959 of SEQ ID NO: 1889056
auauucagugggcgaauau

SEQ ID NO: 2576321 - RNA, 19 nt, Artificial Sequence
  Description of Artificial Sequence: Synthetic oligonucleotide
  Antisense strand to SEQ ID NO: 2576320
auauucgcccacugaauau

SEQ ID NO: 2576322 - RNA, 19 nt, Artificial Sequence
  Description of Artificial Sequence: Synthetic oligonucleotide
  Sense strand starting at position 3968 of SEQ ID NO: 1889056
gggcgaauaucaugguaaa

SEQ ID NO: 2576323 - RNA, 19 nt, Artificial Sequence
  Description of Artificial Sequence: Synthetic oligonucleotide
  Antisense strand to SEQ ID NO: 2576322
uuuaccaugauauucgccc

SEQ ID NO: 2576324 - RNA, 19 nt, Artificial Sequence
  Description of Artificial Sequence: Synthetic oligonucleotide
  Sense strand starting at position 3969 of SEQ ID NO: 1889056
ggcgaauaucaugguaaag

SEQ ID NO: 2576325 - RNA, 19 nt, Artificial Sequence
  Description of Artificial Sequence: Synthetic oligonucleotide
  Antisense strand to SEQ ID NO: 2576324
cuuuaccaugauauucgcc

SEQ ID NO: 2576326 - RNA, 19 nt, Artificial Sequence
  Description of Artificial Sequence: Synthetic oligonucleotide
  Sense strand starting at position 248 of SEQ ID NO: 1889057
agcucagugcuguuguaac

SEQ ID NO: 2576327 - RNA, 19 nt, Artificial Sequence
  Description of Artificial Sequence: Synthetic oligonucleotide
  Antisense strand to SEQ ID NO: 2576326
guuacaacagcacugagcu

SEQ ID NO: 2576328 - RNA, 19 nt, Artificial Sequence
  Description of Artificial Sequence: Synthetic oligonucleotide
  Sense strand starting at position 279 of SEQ ID NO: 1889057
cugacaggugcucaauaau

SEQ ID NO: 2576329 - RNA, 19 nt, Artificial Sequence
  Description of Artificial Sequence: Synthetic oligonucleotide
  Antisense strand to SEQ ID NO: 2576328
auuauugagcaccugucag

SEQ ID NO: 2576330 - RNA, 19 nt, Artificial Sequence
  Description of Artificial Sequence: Synthetic oligonucleotide
  Sense strand starting at position 282 of SEQ ID NO: 1889057
acaggugcucaauaauacu

SEQ ID NO: 2576331 - RNA, 19 nt, Artificial Sequence
  Description of Artificial Sequence: Synthetic oligonucleotide
  Antisense strand to SEQ ID NO: 2576330
aguauuauugagcaccugu

SEQ ID NO: 2576332 - RNA, 19 nt, Artificial Sequence
  Description of Artificial Sequence: Synthetic oligonucleotide
  Sense strand starting at position 316 of SEQ ID NO: 1889057
uggagacuggcuugaacau

SEQ ID NO: 2576333 - RNA, 19 nt, Artificial Sequence
  Description of Artificial Sequence: Synthetic oligonucleotide
  Antisense strand to SEQ ID NO: 2576332
auguucaagccagucucca

SEQ ID NO: 2576334 - RNA, 19 nt, Artificial Sequence
  Description of Artificial Sequence: Synthetic oligonucleotide
  Sense strand starting at position 489 of SEQ ID NO: 1889057
gggaaucgccggcagagaa

SEQ ID NO: 2576335 - RNA, 19 nt, Artificial Sequence
  Description of Artificial Sequence: Synthetic oligonucleotide
  Antisense strand to SEQ ID NO: 2576334
uucucugccggcgauuccc

SEQ ID NO: 2576336 - RNA, 19 nt, Artificial Sequence
  Description of Artificial Sequence: Synthetic oligonucleotide
  Sense strand starting at position 522 of SEQ ID NO: 1889057
ugugaagugcugcuugguu

SEQ ID NO: 2576337 - RNA, 19 nt, Artificial Sequence
  Description of Artificial Sequence: Synthetic oligonucleotide
  Antisense strand to SEQ ID NO: 2576336
aaccaagcagcacuucaca

SEQ ID NO: 2576338 - RNA, 19 nt, Artificial Sequence
  Description of Artificial Sequence: Synthetic oligonucleotide
  Sense strand starting at position 578 of SEQ ID NO: 1889057
ucaucauggccugaagacu

SEQ ID NO: 2576339 - RNA, 19 nt, Artificial Sequence
  Description of Artificial Sequence: Synthetic oligonucleotide
  Antisense strand to SEQ ID NO: 2576338
agucuucaggccaugauga

SEQ ID NO: 2576340 - RNA, 19 nt, Artificial Sequence
  Description of Artificial Sequence: Synthetic oligonucleotide
  Sense strand starting at position 1002 of SEQ ID NO: 1889057
guguguugcugauuucaag

SEQ ID NO: 2576341 - RNA, 19 nt, Artificial Sequence
  Description of Artificial Sequence: Synthetic oligonucleotide
  Antisense strand to SEQ ID NO: 2576340
cuugaaaucagcaacacac

SEQ ID NO: 2576342 - RNA, 19 nt, Artificial Sequence
  Description of Artificial Sequence: Synthetic oligonucleotide
  Sense strand starting at position 1384 of SEQ ID NO: 1889057
aggauuauauggcucagua

SEQ ID NO: 2576343 - RNA, 19 nt, Artificial Sequence
  Description of Artificial Sequence: Synthetic oligonucleotide
  Antisense strand to SEQ ID NO: 2576342
uacugagccauauaauccu

SEQ ID NO: 2576344 - RNA, 19 nt, Artificial Sequence
  Description of Artificial Sequence: Synthetic oligonucleotide
  Sense strand starting at position 1386 of SEQ ID NO: 1889057
gauuauauggcucaguauu

SEQ ID NO: 2576345 - RNA, 19 nt, Artificial Sequence
  Description of Artificial Sequence: Synthetic oligonucleotide
  Antisense strand to SEQ ID NO: 2576344
aauacugagccauauaauc

SEQ ID NO: 2576346 - RNA, 19 nt, Artificial Sequence
  Description of Artificial Sequence: Synthetic oligonucleotide
  Sense strand starting at position 1426 of SEQ ID NO: 1889057
ccaagauaccuguauggca

SEQ ID NO: 2576347 - RNA, 19 nt, Artificial Sequence
  Description of Artificial Sequence: Synthetic oligonucleotide
  Antisense strand to SEQ ID NO: 2576346
ugccauacagguaucuugg

SEQ ID NO: 2576348 - RNA, 19 nt, Artificial Sequence
  Description of Artificial Sequence: Synthetic oligonucleotide
  Sense strand starting at position 1827 of SEQ ID NO: 1889057
uuauguaugcuggcgaugu

SEQ ID NO: 2576349 - RNA, 19 nt, Artificial Sequence
  Description of Artificial Sequence: Synthetic oligonucleotide
  Antisense strand to SEQ ID NO: 2576348
acaucgccagcauacauaa

SEQ ID NO: 2576350 - RNA, 19 nt, Artificial Sequence
  Description of Artificial Sequence: Synthetic oligonucleotide
  Sense strand starting at position 1838 of SEQ ID NO: 1889057
ggcgauguccggguguuau

SEQ ID NO: 2576351 - RNA, 19 nt, Artificial Sequence
  Description of Artificial Sequence: Synthetic oligonucleotide
  Antisense strand to SEQ ID NO: 2576350
auaacacccggacaucgcc

SEQ ID NO: 2576352 - RNA, 19 nt, Artificial Sequence
  Description of Artificial Sequence: Synthetic oligonucleotide
  Sense strand starting at position 1852 of SEQ ID NO: 1889057
guuaucaaaucucuggaaa

SEQ ID NO: 2576353 - RNA, 19 nt, Artificial Sequence
  Description of Artificial Sequence: Synthetic oligonucleotide
  Antisense strand to SEQ ID NO: 2576352
uuuccagagauuugauaac

SEQ ID NO: 2576354 - RNA, 19 nt, Artificial Sequence
  Description of Artificial Sequence: Synthetic oligonucleotide
  Sense strand starting at position 1871 of SEQ ID NO: 1889057
ggaagauacguacaguauc

SEQ ID NO: 2576355 - RNA, 19 nt, Artificial Sequence
  Description of Artificial Sequence: Synthetic oligonucleotide
  Antisense strand to SEQ ID NO: 2576354
gauacuguacguaucuucc

SEQ ID NO: 2576356 - RNA, 19 nt, Artificial Sequence
  Description of Artificial Sequence: Synthetic oligonucleotide
  Sense strand starting at position 1904 of SEQ ID NO: 1889057
gauugagcccaauaaguug

SEQ ID NO: 2576357 - RNA, 19 nt, Artificial Sequence
  Description of Artificial Sequence: Synthetic oligonucleotide
  Antisense strand to SEQ ID NO: 2576356
caacuuauugggcucaauc

SEQ ID NO: 2576358 - RNA, 19 nt, Artificial Sequence
  Description of Artificial Sequence: Synthetic oligonucleotide
  Sense strand starting at position 2010 of SEQ ID NO: 1889057
aagagaacccuuuggguuu

SEQ ID NO: 2576359 - RNA, 19 nt, Artificial Sequence
  Description of Artificial Sequence: Synthetic oligonucleotide
  Antisense strand to SEQ ID NO: 2576358
aaacccaaaggguucucuu

SEQ ID NO: 2576360 - RNA, 19 nt, Artificial Sequence
  Description of Artificial Sequence: Synthetic oligonucleotide
  Sense strand starting at position 2024 of SEQ ID NO: 1889057
gguuucccauccucagaaa

SEQ ID NO: 2576361 - RNA, 19 nt, Artificial Sequence
  Description of Artificial Sequence: Synthetic oligonucleotide
  Antisense strand to SEQ ID NO: 2576360
uuucugaggaugggaaacc

SEQ ID NO: 2576362 - RNA, 19 nt, Artificial Sequence
  Description of Artificial Sequence: Synthetic oligonucleotide
  Sense strand starting at position 2035 of SEQ ID NO: 1889057
cucagaaacuugucuagaa

SEQ ID NO: 2576363 - RNA, 19 nt, Artificial Sequence
  Description of Artificial Sequence: Synthetic oligonucleotide
  Antisense strand to SEQ ID NO: 2576362
uucuagacaaguuucugag

SEQ ID NO: 2576364 - RNA, 19 nt, Artificial Sequence
  Description of Artificial Sequence: Synthetic oligonucleotide
  Sense strand starting at position 2036 of SEQ ID NO: 1889057
ucagaaacuugucuagaag

SEQ ID NO: 2576365 - RNA, 19 nt, Artificial Sequence
  Description of Artificial Sequence: Synthetic oligonucleotide
  Antisense strand to SEQ ID NO: 2576364
cuucuagacaaguuucuga

SEQ ID NO: 2576366 - RNA, 19 nt, Artificial Sequence
  Description of Artificial Sequence: Synthetic oligonucleotide
  Sense strand starting at position 2161 of SEQ ID NO: 1889057
accugauacugguuuagac

SEQ ID NO: 2576367 - RNA, 19 nt, Artificial Sequence
  Description of Artificial Sequence: Synthetic oligonucleotide
  Antisense strand to SEQ ID NO: 2576366
gucuaaaccaguaucaggu

SEQ ID NO: 2576368 - RNA, 19 nt, Artificial Sequence
  Description of Artificial Sequence: Synthetic oligonucleotide
  Sense strand starting at position 2163 of SEQ ID NO: 1889057
cugauacugguuuagacuu

SEQ ID NO: 2576369 - RNA, 19 nt, Artificial Sequence
  Description of Artificial Sequence: Synthetic oligonucleotide
  Antisense strand to SEQ ID NO: 2576368
aagucuaaaccaguaucag

SEQ ID NO: 2576370 - RNA, 19 nt, Artificial Sequence
  Description of Artificial Sequence: Synthetic oligonucleotide
  Sense strand starting at position 2170 of SEQ ID NO: 1889057
ugguuuagacuuuacaucu

SEQ ID NO: 2576371 - RNA, 19 nt, Artificial Sequence
  Description of Artificial Sequence: Synthetic oligonucleotide
  Antisense strand to SEQ ID NO: 2576370
agauguaaagucuaaacca

SEQ ID NO: 2576372 - RNA, 19 nt, Artificial Sequence
  Description of Artificial Sequence: Synthetic oligonucleotide
  Sense strand starting at position 2198 of SEQ ID NO: 1889057
ucccuagcagcugaauuaa

SEQ ID NO: 2576373 - RNA, 19 nt, Artificial Sequence
  Description of Artificial Sequence: Synthetic oligonucleotide
  Antisense strand to SEQ ID NO: 2576372
uuaauucagcugcuaggga

SEQ ID NO: 2576374 - RNA, 19 nt, Artificial Sequence
  Description of Artificial Sequence: Synthetic oligonucleotide
  Sense strand starting at position 2452 of SEQ ID NO: 1889057
gugacucauguccaaggga

SEQ ID NO: 2576375 - RNA, 19 nt, Artificial Sequence
  Description of Artificial Sequence: Synthetic oligonucleotide
  Antisense strand to SEQ ID NO: 2576374
ucccuuggacaugagucac

SEQ ID NO: 2576376 - RNA, 19 nt, Artificial Sequence
  Description of Artificial Sequence: Synthetic oligonucleotide
  Sense strand starting at position 2468 of SEQ ID NO: 1889057
ggaccauguuccuccaaca

SEQ ID NO: 2576377 - RNA, 19 nt, Artificial Sequence
  Description of Artificial Sequence: Synthetic oligonucleotide
  Antisense strand to SEQ ID NO: 2576376
uguuggaggaacauggucc

SEQ ID NO: 2576378 - RNA, 19 nt, Artificial Sequence
  Description of Artificial Sequence: Synthetic oligonucleotide
  Sense strand starting at position 2545 of SEQ ID NO: 1889057
cuucuuauugcggacaaca

SEQ ID NO: 2576379 - RNA, 19 nt, Artificial Sequence
  Description of Artificial Sequence: Synthetic oligonucleotide
  Antisense strand to SEQ ID NO: 2576378
uguuguccgcaauaagaag

SEQ ID NO: 2576380 - RNA, 19 nt, Artificial Sequence
  Description of Artificial Sequence: Synthetic oligonucleotide
  Sense strand starting at position 2547 of SEQ ID NO: 1889057
ucuuauugcggacaacaua

SEQ ID NO: 2576381 - RNA, 19 nt, Artificial Sequence
  Description of Artificial Sequence: Synthetic oligonucleotide
  Antisense strand to SEQ ID NO: 2576380
uauguuguccgcaauaaga

SEQ ID NO: 2576382 - RNA, 19 nt, Artificial Sequence
  Description of Artificial Sequence: Synthetic oligonucleotide
  Sense strand starting at position 2571 of SEQ ID NO: 1889057
uacuguguuggucauagag

SEQ ID NO: 2576383 - RNA, 19 nt, Artificial Sequence
  Description of Artificial Sequence: Synthetic oligonucleotide
  Antisense strand to SEQ ID NO: 2576382
cucuaugaccaacacagua

SEQ ID NO: 2576384 - RNA, 19 nt, Artificial Sequence
  Description of Artificial Sequence: Synthetic oligonucleotide
  Sense strand starting at position 2606 of SEQ ID NO: 1889057
acgucuugccgaagauggu

SEQ ID NO: 2576385 - RNA, 19 nt, Artificial Sequence
  Description of Artificial Sequence: Synthetic oligonucleotide
  Antisense strand to SEQ ID NO: 2576384
accaucuucggcaagacgu

SEQ ID NO: 2576386 - RNA, 19 nt, Artificial Sequence
  Description of Artificial Sequence: Synthetic oligonucleotide
  Sense strand starting at position 3197 of SEQ ID NO: 1889057
ucuugaaucaagugacgaa

SEQ ID NO: 2576387 - RNA, 19 nt, Artificial Sequence
  Description of Artificial Sequence: Synthetic oligonucleotide
  Antisense strand to SEQ ID NO: 2576386
uucgucacuugauucaaga

SEQ ID NO: 2576388 - RNA, 19 nt, Artificial Sequence
  Description of Artificial Sequence: Synthetic oligonucleotide
  Sense strand starting at position 3374 of SEQ ID NO: 1889057
agaauucugucaucaagga

SEQ ID NO: 2576389 - RNA, 19 nt, Artificial Sequence
  Description of Artificial Sequence: Synthetic oligonucleotide
  Antisense strand to SEQ ID NO: 2576388
uccuugaugacagaauucu

SEQ ID NO: 2576390 - RNA, 19 nt, Artificial Sequence
  Description of Artificial Sequence: Synthetic oligonucleotide
  Sense strand starting at position 3403 of SEQ ID NO: 1889057
cugaacauugucuacaguu

SEQ ID NO: 2576391 - RNA, 19 nt, Artificial Sequence
  Description of Artificial Sequence: Synthetic oligonucleotide
  Antisense strand to SEQ ID NO: 2576390
aacuguagacaauguucag

SEQ ID NO: 2576392 - RNA, 19 nt, Artificial Sequence
  Description of Artificial Sequence: Synthetic oligonucleotide
  Sense strand starting at position 3445 of SEQ ID NO: 1889057
uggauuacuuucucuuaag

SEQ ID NO: 2576393 - RNA, 19 nt, Artificial Sequence
  Description of Artificial Sequence: Synthetic oligonucleotide
  Antisense strand to SEQ ID NO: 2576392
cuuaagagaaaguaaucca

SEQ ID NO: 2576394 - RNA, 19 nt, Artificial Sequence
  Description of Artificial Sequence: Synthetic oligonucleotide
  Sense strand starting at position 3549 of SEQ ID NO: 1889057
guuucucuaggcuagaaca

SEQ ID NO: 2576395 - RNA, 19 nt, Artificial Sequence
  Description of Artificial Sequence: Synthetic oligonucleotide
  Antisense strand to SEQ ID NO: 2576394
uguucuagccuagagaaac

SEQ ID NO: 2576396 - RNA, 19 nt, Artificial Sequence
  Description of Artificial Sequence: Synthetic oligonucleotide
  Sense strand starting at position 3551 of SEQ ID NO: 1889057
uucucuaggcuagaacauu

SEQ ID NO: 2576397 - RNA, 19 nt, Artificial Sequence
  Description of Artificial Sequence: Synthetic oligonucleotide
  Antisense strand to SEQ ID NO: 2576396
aauguucuagccuagagaa

SEQ ID NO: 2576398 - RNA, 19 nt, Artificial Sequence
  Description of Artificial Sequence: Synthetic oligonucleotide
  Sense strand starting at position 3695 of SEQ ID NO: 1889057
agacauauuccuuguagaa

SEQ ID NO: 2576399 - RNA, 19 nt, Artificial Sequence
  Description of Artificial Sequence: Synthetic oligonucleotide
  Antisense strand to SEQ ID NO: 2576398
uucuacaaggaauaugucu

SEQ ID NO: 2576400 - RNA, 19 nt, Artificial Sequence
  Description of Artificial Sequence: Synthetic oligonucleotide
  Sense strand starting at position 3817 of SEQ ID NO: 1889057
acccuuaaagucuggauca

SEQ ID NO: 2576401 - RNA, 19 nt, Artificial Sequence
  Description of Artificial Sequence: Synthetic oligonucleotide
  Antisense strand to SEQ ID NO: 2576400
ugauccagacuuuaagggu

SEQ ID NO: 2576402 - RNA, 19 nt, Artificial Sequence
  Description of Artificial Sequence: Synthetic oligonucleotide
  Sense strand starting at position 3819 of SEQ ID NO: 1889057
ccuuaaagucuggaucagu

SEQ ID NO: 2576403 - RNA, 19 nt, Artificial Sequence
  Description of Artificial Sequence: Synthetic oligonucleotide
  Antisense strand to SEQ ID NO: 2576402
acugauccagacuuuaagg

SEQ ID NO: 2576404 - RNA, 19 nt, Artificial Sequence
  Description of Artificial Sequence: Synthetic oligonucleotide
  Sense strand starting at position 3822 of SEQ ID NO: 1889057
uaaagucuggaucaguuau

SEQ ID NO: 2576405 - RNA, 19 nt, Artificial Sequence
  Description of Artificial Sequence: Synthetic oligonucleotide
  Antisense strand to SEQ ID NO: 2576404
auaacugauccagacuuua

SEQ ID NO: 2576406 - RNA, 19 nt, Artificial Sequence
  Description of Artificial Sequence: Synthetic oligonucleotide
  Sense strand starting at position 125 of SEQ ID NO: 1889058
aacugaugucagugaagcu

SEQ ID NO: 2576407 - RNA, 19 nt, Artificial Sequence
  Description of Artificial Sequence: Synthetic oligonucleotide
  Antisense strand to SEQ ID NO: 2576406
agcuucacugacaucaguu

SEQ ID NO: 2576408 - RNA, 19 nt, Artificial Sequence
  Description of Artificial Sequence: Synthetic oligonucleotide
  Sense strand starting at position 263 of SEQ ID NO: 1889058
cuuacaugguucucgagaa

SEQ ID NO: 2576409 - RNA, 19 nt, Artificial Sequence
  Description of Artificial Sequence: Synthetic oligonucleotide
  Antisense strand to SEQ ID NO: 2576408
uucucgagaaccauguaag

SEQ ID NO: 2576410 - RNA, 19 nt, Artificial Sequence
  Description of Artificial Sequence: Synthetic oligonucleotide
  Sense strand starting at position 303 of SEQ ID NO: 1889058
uagguauguccugagaagu

SEQ ID NO: 2576411 - RNA, 19 nt, Artificial Sequence
  Description of Artificial Sequence: Synthetic oligonucleotide
  Antisense strand to SEQ ID NO: 2576410
acuucucaggacauaccua

SEQ ID NO: 2576412 - RNA, 19 nt, Artificial Sequence
  Description of Artificial Sequence: Synthetic oligonucleotide
  Sense strand starting at position 551 of SEQ ID NO: 1889058
auacgagcuuuauuaaucu

SEQ ID NO: 2576413 - RNA, 19 nt, Artificial Sequence
  Description of Artificial Sequence: Synthetic oligonucleotide
  Antisense strand to SEQ ID NO: 2576412
agauuaauaaagcucguau

SEQ ID NO: 2576414 - RNA, 19 nt, Artificial Sequence
  Description of Artificial Sequence: Synthetic oligonucleotide
  Sense strand starting at position 940 of SEQ ID NO: 1889058
cccacuagucaguggaacu

SEQ ID NO: 2576415 - RNA, 19 nt, Artificial Sequence
  Description of Artificial Sequence: Synthetic oligonucleotide
  Antisense strand to SEQ ID NO: 2576414
aguuccacugacuaguggg

SEQ ID NO: 2576416 - RNA, 19 nt, Artificial Sequence
  Description of Artificial Sequence: Synthetic oligonucleotide
  Sense strand starting at position 951 of SEQ ID NO: 1889058
guggaacuguucucaaucu

SEQ ID NO: 2576417 - RNA, 19 nt, Artificial Sequence
  Description of Artificial Sequence: Synthetic oligonucleotide
  Antisense strand to SEQ ID NO: 2576416
agauugagaacaguuccac

SEQ ID NO: 2576418 - RNA, 19 nt, Artificial Sequence
  Description of Artificial Sequence: Synthetic oligonucleotide
  Sense strand starting at position 1052 of SEQ ID NO: 1889058
cugaccuguuugucuuaca

SEQ ID NO: 2576419 - RNA, 19 nt, Artificial Sequence
  Description of Artificial Sequence: Synthetic oligonucleotide
  Antisense strand to SEQ ID NO: 2576418
uguaagacaaacaggucag

SEQ ID NO: 2576420 - RNA, 19 nt, Artificial Sequence
  Description of Artificial Sequence: Synthetic oligonucleotide
  Sense strand starting at position 2543 of SEQ ID NO: 1889058
gucccucuggcauguauga

SEQ ID NO: 2576421 - RNA, 19 nt, Artificial Sequence
  Description of Artificial Sequence: Synthetic oligonucleotide
  Antisense strand to SEQ ID NO: 2576420
ucauacaugccagagggac

SEQ ID NO: 2576422 - RNA, 19 nt, Artificial Sequence
  Description of Artificial Sequence: Synthetic oligonucleotide
  Sense strand starting at position 2650 of SEQ ID NO: 1889058
ugucucauucuugaggcuu

SEQ ID NO: 2576423 - RNA, 19 nt, Artificial Sequence
  Description of Artificial Sequence: Synthetic oligonucleotide
  Antisense strand to SEQ ID NO: 2576422
aagccucaagaaugagaca

SEQ ID NO: 2576424 - RNA, 19 nt, Artificial Sequence
  Description of Artificial Sequence: Synthetic oligonucleotide
  Sense strand starting at position 2662 of SEQ ID NO: 1889058
gaggcuuugcaguacuaau

SEQ ID NO: 2576425 - RNA, 19 nt, Artificial Sequence
  Description of Artificial Sequence: Synthetic oligonucleotide
  Antisense strand to SEQ ID NO: 2576424
auuaguacugcaaagccuc

SEQ ID NO: 2576426 - RNA, 19 nt, Artificial Sequence
  Description of Artificial Sequence: Synthetic oligonucleotide
  Sense strand starting at position 2702 of SEQ ID NO: 1889058
acuugcuuauaugugggaa

SEQ ID NO: 2576427 - RNA, 19 nt, Artificial Sequence
  Description of Artificial Sequence: Synthetic oligonucleotide
  Antisense strand to SEQ ID NO: 2576426
uucccacauauaagcaagu

SEQ ID NO: 2576428 - RNA, 19 nt, Artificial Sequence
  Description of Artificial Sequence: Synthetic oligonucleotide
  Sense strand starting at position 2703 of SEQ ID NO: 1889058
cuugcuuauaugugggaau

SEQ ID NO: 2576429 - RNA, 19 nt, Artificial Sequence
  Description of Artificial Sequence: Synthetic oligonucleotide
  Antisense strand to SEQ ID NO: 2576428
auucccacauauaagcaag

SEQ ID NO: 2576430 - RNA, 19 nt, Artificial Sequence
  Description of Artificial Sequence: Synthetic oligonucleotide
  Sense strand starting at position 2755 of SEQ ID NO: 1889058
gccugucagccauaucaau

SEQ ID NO: 2576431 - RNA, 19 nt, Artificial Sequence
  Description of Artificial Sequence: Synthetic oligonucleotide
  Antisense strand to SEQ ID NO: 2576430
auugauauggcugacaggc

SEQ ID NO: 2576432 - RNA, 19 nt, Artificial Sequence
  Description of Artificial Sequence: Synthetic oligonucleotide
  Sense strand starting at position 2836 of SEQ ID NO: 1889058
guauauaaacuaggucaua

SEQ ID NO: 2576433 - RNA, 19 nt, Artificial Sequence
  Description of Artificial Sequence: Synthetic oligonucleotide
  Antisense strand to SEQ ID NO: 2576432
uaugaccuaguuuauauac

SEQ ID NO: 2576434 - RNA, 19 nt, Artificial Sequence
  Description of Artificial Sequence: Synthetic oligonucleotide
  Sense strand starting at position 2936 of SEQ ID NO: 1889058
ccaacuugugaaggcaaga

SEQ ID NO: 2576435 - RNA, 19 nt, Artificial Sequence
  Description of Artificial Sequence: Synthetic oligonucleotide
  Antisense strand to SEQ ID NO: 2576434
ucuugccuucacaaguugg

SEQ ID NO: 2576436 - RNA, 19 nt, Artificial Sequence
  Description of Artificial Sequence: Synthetic oligonucleotide
  Sense strand starting at position 2968 of SEQ ID NO: 1889058
guacuuuacaaaggugaga

SEQ ID NO: 2576437 - RNA, 19 nt, Artificial Sequence
  Description of Artificial Sequence: Synthetic oligonucleotide
  Antisense strand to SEQ ID NO: 2576436
ucucaccuuuguaaaguac

SEQ ID NO: 2576438 - RNA, 19 nt, Artificial Sequence
  Description of Artificial Sequence: Synthetic oligonucleotide
  Sense strand starting at position 3007 of SEQ ID NO: 1889058
aucuucuaacaguagguua

SEQ ID NO: 2576439 - RNA, 19 nt, Artificial Sequence
  Description of Artificial Sequence: Synthetic oligonucleotide
  Antisense strand to SEQ ID NO: 2576438
uaaccuacuguuagaagau

SEQ ID NO: 2576440 - RNA, 19 nt, Artificial Sequence
  Description of Artificial Sequence: Synthetic oligonucleotide
  Sense strand starting at position 3009 of SEQ ID NO: 1889058
cuucuaacaguagguuaaa

SEQ ID NO: 2576441 - RNA, 19 nt, Artificial Sequence
  Description of Artificial Sequence: Synthetic oligonucleotide
  Antisense strand to SEQ ID NO: 2576440
uuuaaccuacuguuagaag

SEQ ID NO: 2576442 - RNA, 19 nt, Artificial Sequence
  Description of Artificial Sequence: Synthetic oligonucleotide
  Sense strand starting at position 3054 of SEQ ID NO: 1889058
cccaaaucuguuggguuau

SEQ ID NO: 2576443 - RNA, 19 nt, Artificial Sequence
  Description of Artificial Sequence: Synthetic oligonucleotide
  Antisense strand to SEQ ID NO: 2576442
auaacccaacagauuuggg

SEQ ID NO: 2576444 - RNA, 19 nt, Artificial Sequence
  Description of Artificial Sequence: Synthetic oligonucleotide
  Sense strand starting at position 3060 of SEQ ID NO: 1889058
ucuguuggguuaucuauua

SEQ ID NO: 2576445 - RNA, 19 nt, Artificial Sequence
  Description of Artificial Sequence: Synthetic oligonucleotide
  Antisense strand to SEQ ID NO: 2576444
uaauagauaacccaacaga

SEQ ID NO: 2576446 - RNA, 19 nt, Artificial Sequence
  Description of Artificial Sequence: Synthetic oligonucleotide
  Sense strand starting at position 3067 of SEQ ID NO: 1889058
gguuaucuauuaccacaga

SEQ ID NO: 2576447 - RNA, 19 nt, Artificial Sequence
  Description of Artificial Sequence: Synthetic oligonucleotide
  Antisense strand to SEQ ID NO: 2576446
ucugugguaauagauaacc

SEQ ID NO: 2576448 - RNA, 19 nt, Artificial Sequence
  Description of Artificial Sequence: Synthetic oligonucleotide
  Sense strand starting at position 3099 of SEQ ID NO: 1889058
ugugcuucugaacaaauga

SEQ ID NO: 2576449 - RNA, 19 nt, Artificial Sequence
  Description of Artificial Sequence: Synthetic oligonucleotide
  Antisense strand to SEQ ID NO: 2576448
ucauuuguucagaagcaca

SEQ ID NO: 2576450 - RNA, 19 nt, Artificial Sequence
  Description of Artificial Sequence: Synthetic oligonucleotide
  Sense strand starting at position 3110 of SEQ ID NO: 1889058
acaaaugaguuauuccugu

SEQ ID NO: 2576451 - RNA, 19 nt, Artificial Sequence
  Description of Artificial Sequence: Synthetic oligonucleotide
  Antisense strand to SEQ ID NO: 2576450
acaggaauaacucauuugu

SEQ ID NO: 2576452 - RNA, 19 nt, Artificial Sequence
  Description of Artificial Sequence: Synthetic oligonucleotide
  Sense strand starting at position 3170 of SEQ ID NO: 1889058
uuucuugugcaacaguuua

SEQ ID NO: 2576453 - RNA, 19 nt, Artificial Sequence
  Description of Artificial Sequence: Synthetic oligonucleotide
  Antisense strand to SEQ ID NO: 2576452
uaaacuguugcacaagaaa

SEQ ID NO: 2576454 - RNA, 19 nt, Artificial Sequence
  Description of Artificial Sequence: Synthetic oligonucleotide
  Sense strand starting at position 3183 of SEQ ID NO: 1889058
aguuuauucuuccugggag

SEQ ID NO: 2576455 - RNA, 19 nt, Artificial Sequence
  Description of Artificial Sequence: Synthetic oligonucleotide
  Antisense strand to SEQ ID NO: 2576454
cucccaggaagaauaaacu

SEQ ID NO: 2576456 - RNA, 19 nt, Artificial Sequence
  Description of Artificial Sequence: Synthetic oligonucleotide
  Sense strand starting at position 3185 of SEQ ID NO: 1889058
uuuauucuuccugggagac

SEQ ID NO: 2576457 - RNA, 19 nt, Artificial Sequence
  Description of Artificial Sequence: Synthetic oligonucleotide
  Antisense strand to SEQ ID NO: 2576456
gucucccaggaagaauaaa

SEQ ID NO: 2576458 - RNA, 19 nt, Artificial Sequence
  Description of Artificial Sequence: Synthetic oligonucleotide
  Sense strand starting at position 3251 of SEQ ID NO: 1889058
aacuacaugugugcuagua

SEQ ID NO: 2576459 - RNA, 19 nt, Artificial Sequence
  Description of Artificial Sequence: Synthetic oligonucleotide
  Antisense strand to SEQ ID NO: 2576458
uacuagcacacauguaguu

SEQ ID NO: 2576460 - RNA, 19 nt, Artificial Sequence
  Description of Artificial Sequence: Synthetic oligonucleotide
  Sense strand starting at position 3492 of SEQ ID NO: 1889058
cucuguauaucuuugcaua

SEQ ID NO: 2576461 - RNA, 19 nt, Artificial Sequence
  Description of Artificial Sequence: Synthetic oligonucleotide
  Antisense strand to SEQ ID NO: 2576460
uaugcaaagauauacagag

SEQ ID NO: 2576462 - RNA, 19 nt, Artificial Sequence
  Description of Artificial Sequence: Synthetic oligonucleotide
  Sense strand starting at position 3493 of SEQ ID NO: 1889058
ucuguauaucuuugcauau

SEQ ID NO: 2576463 - RNA, 19 nt, Artificial Sequence
  Description of Artificial Sequence: Synthetic oligonucleotide
  Antisense strand to SEQ ID NO: 2576462
auaugcaaagauauacaga

SEQ ID NO: 2576464 - RNA, 19 nt, Artificial Sequence
  Description of Artificial Sequence: Synthetic oligonucleotide
  Sense strand starting at position 3494 of SEQ ID NO: 1889058
cuguauaucuuugcauauu

SEQ ID NO: 2576465 - RNA, 19 nt, Artificial Sequence
  Description of Artificial Sequence: Synthetic oligonucleotide
  Antisense strand to SEQ ID NO: 2576464
aauaugcaaagauauacag

SEQ ID NO: 2576466 - RNA, 19 nt, Artificial Sequence
  Description of Artificial Sequence: Synthetic oligonucleotide
  Sense strand starting at position 3558 of SEQ ID NO: 1889058
uuuccaauccuguguuaag

SEQ ID NO: 2576467 - RNA, 19 nt, Artificial Sequence
  Description of Artificial Sequence: Synthetic oligonucleotide
  Antisense strand to SEQ ID NO: 2576466
cuuaacacaggauuggaaa

SEQ ID NO: 2576468 - RNA, 19 nt, Artificial Sequence
  Description of Artificial Sequence: Synthetic oligonucleotide
  Sense strand starting at position 3559 of SEQ ID NO: 1889058
uuccaauccuguguuaagu

SEQ ID NO: 2576469 - RNA, 19 nt, Artificial Sequence
  Description of Artificial Sequence: Synthetic oligonucleotide
  Antisense strand to SEQ ID NO: 2576468
acuuaacacaggauuggaa

SEQ ID NO: 2576470 - RNA, 19 nt, Artificial Sequence
  Description of Artificial Sequence: Synthetic oligonucleotide
  Sense strand starting at position 3568 of SEQ ID NO: 1889058
uguguuaagucacuuagaa

SEQ ID NO: 2576471 - RNA, 19 nt, Artificial Sequence
  Description of Artificial Sequence: Synthetic oligonucleotide
  Antisense strand to SEQ ID NO: 2576470
uucuaagugacuuaacaca

SEQ ID NO: 2576472 - RNA, 19 nt, Artificial Sequence
  Description of Artificial Sequence: Synthetic oligonucleotide
  Sense strand starting at position 3591 of SEQ ID NO: 1889058
ggucuccagcucuauccaa

SEQ ID NO: 2576473 - RNA, 19 nt, Artificial Sequence
  Description of Artificial Sequence: Synthetic oligonucleotide
  Antisense strand to SEQ ID NO: 2576472
uuggauagagcuggagacc

SEQ ID NO: 2576474 - RNA, 19 nt, Artificial Sequence
  Description of Artificial Sequence: Synthetic oligonucleotide
  Sense strand starting at position 3693 of SEQ ID NO: 1889058
ugauuaauugaugggcacu

SEQ ID NO: 2576475 - RNA, 19 nt, Artificial Sequence
  Description of Artificial Sequence: Synthetic oligonucleotide
  Antisense strand to SEQ ID NO: 2576474
agugcccaucaauuaauca

SEQ ID NO: 2576476 - RNA, 19 nt, Artificial Sequence
  Description of Artificial Sequence: Synthetic oligonucleotide
  Sense strand starting at position 3738 of SEQ ID NO: 1889058
gcaaauuaugguggaauaa

SEQ ID NO: 2576477 - RNA, 19 nt, Artificial Sequence
  Description of Artificial Sequence: Synthetic oligonucleotide
  Antisense strand to SEQ ID NO: 2576476
uuauuccaccauaauuugc

SEQ ID NO: 2576478 - RNA, 19 nt, Artificial Sequence
  Description of Artificial Sequence: Synthetic oligonucleotide
  Sense strand starting at position 3748 of SEQ ID NO: 1889058
guggaauaaacaugcaagu

SEQ ID NO: 2576479 - RNA, 19 nt, Artificial Sequence
  Description of Artificial Sequence: Synthetic oligonucleotide
  Antisense strand to SEQ ID NO: 2576478
acuugcauguuuauuccac

SEQ ID NO: 2576480 - RNA, 19 nt, Artificial Sequence
  Description of Artificial Sequence: Synthetic oligonucleotide
  Sense strand starting at position 3857 of SEQ ID NO: 1889058
aaggaaucuccaugauggu

SEQ ID NO: 2576481 - RNA, 19 nt, Artificial Sequence
  Description of Artificial Sequence: Synthetic oligonucleotide
  Antisense strand to SEQ ID NO: 2576480
accaucauggagauuccuu

SEQ ID NO: 2576482 - RNA, 19 nt, Artificial Sequence
  Description of Artificial Sequence: Synthetic oligonucleotide
  Sense strand starting at position 3863 of SEQ ID NO: 1889058
ucuccaugaugguuuccau

SEQ ID NO: 2576483 - RNA, 19 nt, Artificial Sequence
  Description of Artificial Sequence: Synthetic oligonucleotide
  Antisense strand to SEQ ID NO: 2576482
auggaaaccaucauggaga

SEQ ID NO: 2576484 - RNA, 19 nt, Artificial Sequence
  Description of Artificial Sequence: Synthetic oligonucleotide
  Sense strand starting at position 3866 of SEQ ID NO: 1889058
ccaugaugguuuccauaga

SEQ ID NO: 2576485 - RNA, 19 nt, Artificial Sequence
  Description of Artificial Sequence: Synthetic oligonucleotide
  Antisense strand to SEQ ID NO: 2576484
ucuauggaaaccaucaugg

SEQ ID NO: 2576486 - RNA, 19 nt, Artificial Sequence
  Description of Artificial Sequence: Synthetic oligonucleotide
  Sense strand starting at position 34 of SEQ ID NO: 1889059
aaaccugcaggaugugaua

SEQ ID NO: 2576487 - RNA, 19 nt, Artificial Sequence
  Description of Artificial Sequence: Synthetic oligonucleotide
  Antisense strand to SEQ ID NO: 2576486
uaucacauccugcagguuu

SEQ ID NO: 2576488 - RNA, 19 nt, Artificial Sequence
  Description of Artificial Sequence: Synthetic oligonucleotide
  Sense strand starting at position 153 of SEQ ID NO: 1889059
uuaaauaggguuugucaug

SEQ ID NO: 2576489 - RNA, 19 nt, Artificial Sequence
  Description of Artificial Sequence: Synthetic oligonucleotide
  Antisense strand to SEQ ID NO: 2576488
caugacaaacccuauuuaa

SEQ ID NO: 2576490 - RNA, 19 nt, Artificial Sequence
  Description of Artificial Sequence: Synthetic oligonucleotide
  Sense strand starting at position 159 of SEQ ID NO: 1889059
aggguuugucauggacacu

SEQ ID NO: 2576491 - RNA, 19 nt, Artificial Sequence
  Description of Artificial Sequence: Synthetic oligonucleotide
  Antisense strand to SEQ ID NO: 2576490
aguguccaugacaaacccu

SEQ ID NO: 2576492 - RNA, 19 nt, Artificial Sequence
  Description of Artificial Sequence: Synthetic oligonucleotide
  Sense strand starting at position 190 of SEQ ID NO: 1889059
ccaugagcccucugauaau

SEQ ID NO: 2576493 - RNA, 19 nt, Artificial Sequence
  Description of Artificial Sequence: Synthetic oligonucleotide
  Antisense strand to SEQ ID NO: 2576492
auuaucagagggcucaugg

SEQ ID NO: 2576494 - RNA, 19 nt, Artificial Sequence
  Description of Artificial Sequence: Synthetic oligonucleotide
  Sense strand starting at position 264 of SEQ ID NO: 1889059
gguccauaccugugauucu

SEQ ID NO: 2576495 - RNA, 19 nt, Artificial Sequence
  Description of Artificial Sequence: Synthetic oligonucleotide
  Antisense strand to SEQ ID NO: 2576494
agaaucacagguauggacc

SEQ ID NO: 2576496 - RNA, 19 nt, Artificial Sequence
  Description of Artificial Sequence: Synthetic oligonucleotide
  Sense strand starting at position 309 of SEQ ID NO: 1889059
agagcucuuugcccugaua

SEQ ID NO: 2576497 - RNA, 19 nt, Artificial Sequence
  Description of Artificial Sequence: Synthetic oligonucleotide
  Antisense strand to SEQ ID NO: 2576496
uaucagggcaaagagcucu

SEQ ID NO: 2576498 - RNA, 19 nt, Artificial Sequence
  Description of Artificial Sequence: Synthetic oligonucleotide
  Sense strand starting at position 428 of SEQ ID NO: 1889059
uggagcaaacucugaguua

SEQ ID NO: 2576499 - RNA, 19 nt, Artificial Sequence
  Description of Artificial Sequence: Synthetic oligonucleotide
  Antisense strand to SEQ ID NO: 2576498
uaacucagaguuugcucca

SEQ ID NO: 2576500 - RNA, 19 nt, Artificial Sequence
  Description of Artificial Sequence: Synthetic oligonucleotide
  Sense strand starting at position 431 of SEQ ID NO: 1889059
agcaaacucugaguuauaa

SEQ ID NO: 2576501 - RNA, 19 nt, Artificial Sequence
  Description of Artificial Sequence: Synthetic oligonucleotide
  Antisense strand to SEQ ID NO: 2576500
uuauaacucagaguuugcu

SEQ ID NO: 2576502 - RNA, 19 nt, Artificial Sequence
  Description of Artificial Sequence: Synthetic oligonucleotide
  Sense strand starting at position 458 of SEQ ID NO: 1889059
ucagaacucccuuguagga

SEQ ID NO: 2576503 - RNA, 19 nt, Artificial Sequence
  Description of Artificial Sequence: Synthetic oligonucleotide
  Antisense strand to SEQ ID NO: 2576502
uccuacaagggaguucuga

SEQ ID NO: 2576504 - RNA, 19 nt, Artificial Sequence
  Description of Artificial Sequence: Synthetic oligonucleotide
  Sense strand starting at position 471 of SEQ ID NO: 1889059
guaggauuugguugacgcu

SEQ ID NO: 2576505 - RNA, 19 nt, Artificial Sequence
  Description of Artificial Sequence: Synthetic oligonucleotide
  Antisense strand to SEQ ID NO: 2576504
agcgucaaccaaauccuac

SEQ ID NO: 2576506 - RNA, 19 nt, Artificial Sequence
  Description of Artificial Sequence: Synthetic oligonucleotide
  Sense strand starting at position 478 of SEQ ID NO: 1889059
uugguugacgcugagacuu

SEQ ID NO: 2576507 - RNA, 19 nt, Artificial Sequence
  Description of Artificial Sequence: Synthetic oligonucleotide
  Antisense strand to SEQ ID NO: 2576506
aagucucagcgucaaccaa

SEQ ID NO: 2576508 - RNA, 19 nt, Artificial Sequence
  Description of Artificial Sequence: Synthetic oligonucleotide
  Sense strand starting at position 489 of SEQ ID NO: 1889059
ugagacuuggcuuggaaca

SEQ ID NO: 2576509 - RNA, 19 nt, Artificial Sequence
  Description of Artificial Sequence: Synthetic oligonucleotide
  Antisense strand to SEQ ID NO: 2576508
uguuccaagccaagucuca

SEQ ID NO: 2576510 - RNA, 19 nt, Artificial Sequence
  Description of Artificial Sequence: Synthetic oligonucleotide
  Sense strand starting at position 557 of SEQ ID NO: 1889059
uuacuuguuucucuaagga

SEQ ID NO: 2576511 - RNA, 19 nt, Artificial Sequence
  Description of Artificial Sequence: Synthetic oligonucleotide
  Antisense strand to SEQ ID NO: 2576510
uccuuagagaaacaaguaa

SEQ ID NO: 2576512 - RNA, 19 nt, Artificial Sequence
  Description of Artificial Sequence: Synthetic oligonucleotide
  Sense strand starting at position 611 of SEQ ID NO: 1889059
aguuucuguccuuaauaau

SEQ ID NO: 2576513 - RNA, 19 nt, Artificial Sequence
  Description of Artificial Sequence: Synthetic oligonucleotide
  Antisense strand to SEQ ID NO: 2576512
auuauuaaggacagaaacu

SEQ ID NO: 2576514 - RNA, 19 nt, Artificial Sequence
  Description of Artificial Sequence: Synthetic oligonucleotide
  Sense strand starting at position 651 of SEQ ID NO: 1889059
cucagaaguuugguuacua

SEQ ID NO: 2576515 - RNA, 19 nt, Artificial Sequence
  Description of Artificial Sequence: Synthetic oligonucleotide
  Antisense strand to SEQ ID NO: 2576514
uaguaaccaaacuucugag

SEQ ID NO: 2576516 - RNA, 19 nt, Artificial Sequence
  Description of Artificial Sequence: Synthetic oligonucleotide
  Sense strand starting at position 652 of SEQ ID NO: 1889059
ucagaaguuugguuacuaa

SEQ ID NO: 2576517 - RNA, 19 nt, Artificial Sequence
  Description of Artificial Sequence: Synthetic oligonucleotide
  Antisense strand to SEQ ID NO: 2576516
uuaguaaccaaacuucuga

SEQ ID NO: 2576518 - RNA, 19 nt, Artificial Sequence
  Description of Artificial Sequence: Synthetic oligonucleotide
  Sense strand starting at position 655 of SEQ ID NO: 1889059
gaaguuugguuacuaagau

SEQ ID NO: 2576519 - RNA, 19 nt, Artificial Sequence
  Description of Artificial Sequence: Synthetic oligonucleotide
  Antisense strand to SEQ ID NO: 2576518
aucuuaguaaccaaacuuc

SEQ ID NO: 2576520 - RNA, 19 nt, Artificial Sequence
  Description of Artificial Sequence: Synthetic oligonucleotide
  Sense strand starting at position 668 of SEQ ID NO: 1889059
uaagauucccagugccaug

SEQ ID NO: 2576521 - RNA, 19 nt, Artificial Sequence
  Description of Artificial Sequence: Synthetic oligonucleotide
  Antisense strand to SEQ ID NO: 2576520
cauggcacugggaaucuua

SEQ ID NO: 2576522 - RNA, 19 nt, Artificial Sequence
  Description of Artificial Sequence: Synthetic oligonucleotide
  Sense strand starting at position 678 of SEQ ID NO: 1889059
agugccaugucuuuaauuu

SEQ ID NO: 2576523 - RNA, 19 nt, Artificial Sequence
  Description of Artificial Sequence: Synthetic oligonucleotide
  Antisense strand to SEQ ID NO: 2576522
aaauuaaagacauggcacu

SEQ ID NO: 2576524 - RNA, 19 nt, Artificial Sequence
  Description of Artificial Sequence: Synthetic oligonucleotide
  Sense strand starting at position 2466 of SEQ ID NO: 1889059
ugaauacaauguggaauuu

SEQ ID NO: 2576525 - RNA, 19 nt, Artificial Sequence
  Description of Artificial Sequence: Synthetic oligonucleotide
  Antisense strand to SEQ ID NO: 2576524
aaauuccacauuguauuca

SEQ ID NO: 2576526 - RNA, 19 nt, Artificial Sequence
  Description of Artificial Sequence: Synthetic oligonucleotide
  Sense strand starting at position 2842 of SEQ ID NO: 1889059
cuuaacugccuuugagaca

SEQ ID NO: 2576527 - RNA, 19 nt, Artificial Sequence
  Description of Artificial Sequence: Synthetic oligonucleotide
  Antisense strand to SEQ ID NO: 2576526
ugucucaaaggcaguuaag

SEQ ID NO: 2576528 - RNA, 19 nt, Artificial Sequence
  Description of Artificial Sequence: Synthetic oligonucleotide
  Sense strand starting at position 2882 of SEQ ID NO: 1889059
ucuauugauccaugcaguu

SEQ ID NO: 2576529 - RNA, 19 nt, Artificial Sequence
  Description of Artificial Sequence: Synthetic oligonucleotide
  Antisense strand to SEQ ID NO: 2576528
aacugcauggaucaauaga

SEQ ID NO: 2576530 - RNA, 19 nt, Artificial Sequence
  Description of Artificial Sequence: Synthetic oligonucleotide
  Sense strand starting at position 2971 of SEQ ID NO: 1889059
acaugugauuugcaaugaa

SEQ ID NO: 2576531 - RNA, 19 nt, Artificial Sequence
  Description of Artificial Sequence: Synthetic oligonucleotide
  Antisense strand to SEQ ID NO: 2576530
uucauugcaaaucacaugu

SEQ ID NO: 2576532 - RNA, 19 nt, Artificial Sequence
  Description of Artificial Sequence: Synthetic oligonucleotide
  Sense strand starting at position 3053 of SEQ ID NO: 1889059
uggugcaaugcuuaaguga

SEQ ID NO: 2576533 - RNA, 19 nt, Artificial Sequence
  Description of Artificial Sequence: Synthetic oligonucleotide
  Antisense strand to SEQ ID NO: 2576532
ucacuuaagcauugcacca

SEQ ID NO: 2576534 - RNA, 19 nt, Artificial Sequence
  Description of Artificial Sequence: Synthetic oligonucleotide
  Sense strand starting at position 3056 of SEQ ID NO: 1889059
ugcaaugcuuaagugaaua

SEQ ID NO: 2576535 - RNA, 19 nt, Artificial Sequence
  Description of Artificial Sequence: Synthetic oligonucleotide
  Antisense strand to SEQ ID NO: 2576534
uauucacuuaagcauugca

SEQ ID NO: 2576536 - RNA, 19 nt, Artificial Sequence
  Description of Artificial Sequence: Synthetic oligonucleotide
  Sense strand starting at position 3109 of SEQ ID NO: 1889059
guuuauugggcagguuaca

SEQ ID NO: 2576537 - RNA, 19 nt, Artificial Sequence
  Description of Artificial Sequence: Synthetic oligonucleotide
  Antisense strand to SEQ ID NO: 2576536
uguaaccugcccaauaaac

SEQ ID NO: 2576538 - RNA, 19 nt, Artificial Sequence
  Description of Artificial Sequence: Synthetic oligonucleotide
  Sense strand starting at position 3244 of SEQ ID NO: 1889059
gaguuauagaguugggacu

SEQ ID NO: 2576539 - RNA, 19 nt, Artificial Sequence
  Description of Artificial Sequence: Synthetic oligonucleotide
  Antisense strand to SEQ ID NO: 2576538
agucccaacucuauaacuc

SEQ ID NO: 2576540 - RNA, 19 nt, Artificial Sequence
  Description of Artificial Sequence: Synthetic oligonucleotide
  Sense strand starting at position 3245 of SEQ ID NO: 1889059
aguuauagaguugggacua

SEQ ID NO: 2576541 - RNA, 19 nt, Artificial Sequence
  Description of Artificial Sequence: Synthetic oligonucleotide
  Antisense strand to SEQ ID NO: 2576540
uagucccaacucuauaacu

SEQ ID NO: 2576542 - RNA, 19 nt, Artificial Sequence
  Description of Artificial Sequence: Synthetic oligonucleotide
  Sense strand starting at position 3260 of SEQ ID NO: 1889059
acuaauuggugccugauua

SEQ ID NO: 2576543 - RNA, 19 nt, Artificial Sequence
  Description of Artificial Sequence: Synthetic oligonucleotide
  Antisense strand to SEQ ID NO: 2576542
uaaucaggcaccaauuagu

SEQ ID NO: 2576544 - RNA, 19 nt, Artificial Sequence
  Description of Artificial Sequence: Synthetic oligonucleotide
  Sense strand starting at position 3261 of SEQ ID NO: 1889059
cuaauuggugccugauuaa

SEQ ID NO: 2576545 - RNA, 19 nt, Artificial Sequence
  Description of Artificial Sequence: Synthetic oligonucleotide
  Antisense strand to SEQ ID NO: 2576544
uuaaucaggcaccaauuag

SEQ ID NO: 2576546 - RNA, 19 nt, Artificial Sequence
  Description of Artificial Sequence: Synthetic oligonucleotide
  Sense strand starting at position 3363 of SEQ ID NO: 1889059
agagcaaucucagugcuaa

SEQ ID NO: 2576547 - RNA, 19 nt, Artificial Sequence
  Description of Artificial Sequence: Synthetic oligonucleotide
  Antisense strand to SEQ ID NO: 2576546
uuagcacugagauugcucu

SEQ ID NO: 2576548 - RNA, 19 nt, Artificial Sequence
  Description of Artificial Sequence: Synthetic oligonucleotide
  Sense strand starting at position 3364 of SEQ ID NO: 1889059
gagcaaucucagugcuaaa

SEQ ID NO: 2576549 - RNA, 19 nt, Artificial Sequence
  Description of Artificial Sequence: Synthetic oligonucleotide
  Antisense strand to SEQ ID NO: 2576548
uuuagcacugagauugcuc

SEQ ID NO: 2576550 - RNA, 19 nt, Artificial Sequence
  Description of Artificial Sequence: Synthetic oligonucleotide
  Sense strand starting at position 3636 of SEQ ID NO: 1889059
ccguaauauuucuaacaag

SEQ ID NO: 2576551 - RNA, 19 nt, Artificial Sequence
  Description of Artificial Sequence: Synthetic oligonucleotide
  Antisense strand to SEQ ID NO: 2576550
cuuguuagaaauauuacgg

SEQ ID NO: 2576552 - RNA, 19 nt, Artificial Sequence
  Description of Artificial Sequence: Synthetic oligonucleotide
  Sense strand starting at position 3685 of SEQ ID NO: 1889059
uccuaauguguuugacuca

SEQ ID NO: 2576553 - RNA, 19 nt, Artificial Sequence
  Description of Artificial Sequence: Synthetic oligonucleotide
  Antisense strand to SEQ ID NO: 2576552
ugagucaaacacauuagga

SEQ ID NO: 2576554 - RNA, 19 nt, Artificial Sequence
  Description of Artificial Sequence: Synthetic oligonucleotide
  Sense strand starting at position 3688 of SEQ ID NO: 1889059
uaauguguuugacucagaa

SEQ ID NO: 2576555 - RNA, 19 nt, Artificial Sequence
  Description of Artificial Sequence: Synthetic oligonucleotide
  Antisense strand to SEQ ID NO: 2576554
uucugagucaaacacauua

SEQ ID NO: 2576556 - RNA, 19 nt, Artificial Sequence
  Description of Artificial Sequence: Synthetic oligonucleotide
  Sense strand starting at position 3727 of SEQ ID NO: 1889059
gauuuaaguuauuaggcca

SEQ ID NO: 2576557 - RNA, 19 nt, Artificial Sequence
  Description of Artificial Sequence: Synthetic oligonucleotide
  Antisense strand to SEQ ID NO: 2576556
uggccuaauaacuuaaauc

SEQ ID NO: 2576558 - RNA, 19 nt, Artificial Sequence
  Description of Artificial Sequence: Synthetic oligonucleotide
  Sense strand starting at position 3740 of SEQ ID NO: 1889059
aggccaaugcccuauauau

SEQ ID NO: 2576559 - RNA, 19 nt, Artificial Sequence
  Description of Artificial Sequence: Synthetic oligonucleotide
  Antisense strand to SEQ ID NO: 2576558
auauauagggcauuggccu

SEQ ID NO: 2576560 - RNA, 19 nt, Artificial Sequence
  Description of Artificial Sequence: Synthetic oligonucleotide
  Sense strand starting at position 3742 of SEQ ID NO: 1889059
gccaaugcccuauauaugu

SEQ ID NO: 2576561 - RNA, 19 nt, Artificial Sequence
  Description of Artificial Sequence: Synthetic oligonucleotide
  Antisense strand to SEQ ID NO: 2576560
acauauauagggcauuggc

SEQ ID NO: 2576562 - RNA, 19 nt, Artificial Sequence
  Description of Artificial Sequence: Synthetic oligonucleotide
  Sense strand starting at position 3786 of SEQ ID NO: 1889059
uguaaagauuucuuucggu

SEQ ID NO: 2576563 - RNA, 19 nt, Artificial Sequence
  Description of Artificial Sequence: Synthetic oligonucleotide
  Antisense strand to SEQ ID NO: 2576562
accgaaagaaaucuuuaca

SEQ ID NO: 2576564 - RNA, 19 nt, Artificial Sequence
  Description of Artificial Sequence: Synthetic oligonucleotide
  Sense strand starting at position 3845 of SEQ ID NO: 1889059
aacacauucgaugguacua

SEQ ID NO: 2576565 - RNA, 19 nt, Artificial Sequence
  Description of Artificial Sequence: Synthetic oligonucleotide
  Antisense strand to SEQ ID NO: 2576564
uaguaccaucgaauguguu

SEQ ID NO: 2576566 - RNA, 19 nt, Artificial Sequence
  Description of Artificial Sequence: Synthetic oligonucleotide
  Sense strand starting at position 12 of SEQ ID NO: 1889060
cucuuauguuuauugucua

SEQ ID NO: 2576567 - RNA, 19 nt, Artificial Sequence
  Description of Artificial Sequence: Synthetic oligonucleotide
  Antisense strand to SEQ ID NO: 2576566
uagacaauaaacauaagag

SEQ ID NO: 2576568 - RNA, 19 nt, Artificial Sequence
  Description of Artificial Sequence: Synthetic oligonucleotide
  Sense strand starting at position 64 of SEQ ID NO: 1889060
gaaagagaucuuugucuau

SEQ ID NO: 2576569 - RNA, 19 nt, Artificial Sequence
  Description of Artificial Sequence: Synthetic oligonucleotide
  Antisense strand to SEQ ID NO: 2576568
auagacaaagaucucuuuc

SEQ ID NO: 2576570 - RNA, 19 nt, Artificial Sequence
  Description of Artificial Sequence: Synthetic oligonucleotide
  Sense strand starting at position 107 of SEQ ID NO: 1889060
aggcuaauauaugucauau

SEQ ID NO: 2576571 - RNA, 19 nt, Artificial Sequence
  Description of Artificial Sequence: Synthetic oligonucleotide
  Antisense strand to SEQ ID NO: 2576570
auaugacauauauuagccu

SEQ ID NO: 2576572 - RNA, 19 nt, Artificial Sequence
  Description of Artificial Sequence: Synthetic oligonucleotide
  Sense strand starting at position 266 of SEQ ID NO: 1889060
aguguugagagaggcauua

SEQ ID NO: 2576573 - RNA, 19 nt, Artificial Sequence
  Description of Artificial Sequence: Synthetic oligonucleotide
  Antisense strand to SEQ ID NO: 2576572
uaaugccucucucaacacu

SEQ ID NO: 2576574 - RNA, 19 nt, Artificial Sequence
  Description of Artificial Sequence: Synthetic oligonucleotide
  Sense strand starting at position 268 of SEQ ID NO: 1889060
uguugagagaggcauuauc

SEQ ID NO: 2576575 - RNA, 19 nt, Artificial Sequence
  Description of Artificial Sequence: Synthetic oligonucleotide
  Antisense strand to SEQ ID NO: 2576574
gauaaugccucucucaaca

SEQ ID NO: 2576576 - RNA, 19 nt, Artificial Sequence
  Description of Artificial Sequence: Synthetic oligonucleotide
  Sense strand starting at position 327 of SEQ ID NO: 1889060
aagaaucaggcucaguuau

SEQ ID NO: 2576577 - RNA, 19 nt, Artificial Sequence
  Description of Artificial Sequence: Synthetic oligonucleotide
  Antisense strand to SEQ ID NO: 2576576
auaacugagccugauucuu

SEQ ID NO: 2576578 - RNA, 19 nt, Artificial Sequence
  Description of Artificial Sequence: Synthetic oligonucleotide
  Sense strand starting at position 329 of SEQ ID NO: 1889060
gaaucaggcucaguuauaa

SEQ ID NO: 2576579 - RNA, 19 nt, Artificial Sequence
  Description of Artificial Sequence: Synthetic oligonucleotide
  Antisense strand to SEQ ID NO: 2576578
uuauaacugagccugauuc

SEQ ID NO: 2576580 - RNA, 19 nt, Artificial Sequence
  Description of Artificial Sequence: Synthetic oligonucleotide
  Sense strand starting at position 484 of SEQ ID NO: 1889060
ucaguuucuuaucuguaca

SEQ ID NO: 2576581 - RNA, 19 nt, Artificial Sequence
  Description of Artificial Sequence: Synthetic oligonucleotide
  Antisense strand to SEQ ID NO: 2576580
uguacagauaagaaacuga

SEQ ID NO: 2576582 - RNA, 19 nt, Artificial Sequence
  Description of Artificial Sequence: Synthetic oligonucleotide
  Sense strand starting at position 486 of SEQ ID NO: 1889060
aguuucuuaucuguacaau

SEQ ID NO: 2576583 - RNA, 19 nt, Artificial Sequence
  Description of Artificial Sequence: Synthetic oligonucleotide
  Antisense strand to SEQ ID NO: 2576582
auuguacagauaagaaacu

SEQ ID NO: 2576584 - RNA, 19 nt, Artificial Sequence
  Description of Artificial Sequence: Synthetic oligonucleotide
  Sense strand starting at position 525 of SEQ ID NO: 1889060
guuguaaagcaauauaaca

SEQ ID NO: 2576585 - RNA, 19 nt, Artificial Sequence
  Description of Artificial Sequence: Synthetic oligonucleotide
  Antisense strand to SEQ ID NO: 2576584
uguuauauugcuuuacaac

SEQ ID NO: 2576586 - RNA, 19 nt, Artificial Sequence
  Description of Artificial Sequence: Synthetic oligonucleotide
  Sense strand starting at position 541 of SEQ ID NO: 1889060
acacauguauucuuggaga

SEQ ID NO: 2576587 - RNA, 19 nt, Artificial Sequence
  Description of Artificial Sequence: Synthetic oligonucleotide
  Antisense strand to SEQ ID NO: 2576586
ucuccaagaauacaugugu

SEQ ID NO: 2576588 - RNA, 19 nt, Artificial Sequence
  Description of Artificial Sequence: Synthetic oligonucleotide
  Sense strand starting at position 543 of SEQ ID NO: 1889060
acauguauucuuggagaau

SEQ ID NO: 2576589 - RNA, 19 nt, Artificial Sequence
  Description of Artificial Sequence: Synthetic oligonucleotide
  Antisense strand to SEQ ID NO: 2576588
auucuccaagaauacaugu

SEQ ID NO: 2576590 - RNA, 19 nt, Artificial Sequence
  Description of Artificial Sequence: Synthetic oligonucleotide
  Sense strand starting at position 626 of SEQ ID NO: 1889060
cuucuauauuuguugcaua

SEQ ID NO: 2576591 - RNA, 19 nt, Artificial Sequence
  Description of Artificial Sequence: Synthetic oligonucleotide
  Antisense strand to SEQ ID NO: 2576590
uaugcaacaaauauagaag

SEQ ID NO: 2576592 - RNA, 19 nt, Artificial Sequence
  Description of Artificial Sequence: Synthetic oligonucleotide
  Sense strand starting at position 2073 of SEQ ID NO: 1889060
aauauaugugcaugggauu

SEQ ID NO: 2576593 - RNA, 19 nt, Artificial Sequence
  Description of Artificial Sequence: Synthetic oligonucleotide
  Antisense strand to SEQ ID NO: 2576592
aaucccaugcacauauauu

SEQ ID NO: 2576594 - RNA, 19 nt, Artificial Sequence
  Description of Artificial Sequence: Synthetic oligonucleotide
  Sense strand starting at position 2125 of SEQ ID NO: 1889060
accaucuuguaguuugaaa

SEQ ID NO: 2576595 - RNA, 19 nt, Artificial Sequence
  Description of Artificial Sequence: Synthetic oligonucleotide
  Antisense strand to SEQ ID NO: 2576594
uuucaaacuacaagauggu

SEQ ID NO: 2576596 - RNA, 19 nt, Artificial Sequence
  Description of Artificial Sequence: Synthetic oligonucleotide
  Sense strand starting at position 2567 of SEQ ID NO: 1889060
uagagaugauaggaacuau

SEQ ID NO: 2576597 - RNA, 19 nt, Artificial Sequence
  Description of Artificial Sequence: Synthetic oligonucleotide
  Antisense strand to SEQ ID NO: 2576596
auaguuccuaucaucucua

SEQ ID NO: 2576598 - RNA, 19 nt, Artificial Sequence
  Description of Artificial Sequence: Synthetic oligonucleotide
  Sense strand starting at position 2584 of SEQ ID NO: 1889060
auauucuuguuucucuaga

SEQ ID NO: 2576599 - RNA, 19 nt, Artificial Sequence
  Description of Artificial Sequence: Synthetic oligonucleotide
  Antisense strand to SEQ ID NO: 2576598
ucuagagaaacaagaauau

SEQ ID NO: 2576600 - RNA, 19 nt, Artificial Sequence
  Description of Artificial Sequence: Synthetic oligonucleotide
  Sense strand starting at position 2714 of SEQ ID NO: 1889060
acuauauuauaugagggau

SEQ ID NO: 2576601 - RNA, 19 nt, Artificial Sequence
  Description of Artificial Sequence: Synthetic oligonucleotide
  Antisense strand to SEQ ID NO: 2576600
aucccucauauaauauagu

SEQ ID NO: 2576602 - RNA, 19 nt, Artificial Sequence
  Description of Artificial Sequence: Synthetic oligonucleotide
  Sense strand starting at position 2716 of SEQ ID NO: 1889060
uauauuauaugagggauag

SEQ ID NO: 2576603 - RNA, 19 nt, Artificial Sequence
  Description of Artificial Sequence: Synthetic oligonucleotide
  Antisense strand to SEQ ID NO: 2576602
cuaucccucauauaauaua

SEQ ID NO: 2576604 - RNA, 19 nt, Artificial Sequence
  Description of Artificial Sequence: Synthetic oligonucleotide
  Sense strand starting at position 2748 of SEQ ID NO: 1889060
uuacauaugccucacugga

SEQ ID NO: 2576605 - RNA, 19 nt, Artificial Sequence
  Description of Artificial Sequence: Synthetic oligonucleotide
  Antisense strand to SEQ ID NO: 2576604
uccagugaggcauauguaa

SEQ ID NO: 2576606 - RNA, 19 nt, Artificial Sequence
  Description of Artificial Sequence: Synthetic oligonucleotide
  Sense strand starting at position 2868 of SEQ ID NO: 1889060
auggauugcucuuuaauua

SEQ ID NO: 2576607 - RNA, 19 nt, Artificial Sequence
  Description of Artificial Sequence: Synthetic oligonucleotide
  Antisense strand to SEQ ID NO: 2576606
uaauuaaagagcaauccau

SEQ ID NO: 2576608 - RNA, 19 nt, Artificial Sequence
  Description of Artificial Sequence: Synthetic oligonucleotide
  Sense strand starting at position 2869 of SEQ ID NO: 1889060
uggauugcucuuuaauuau

SEQ ID NO: 2576609 - RNA, 19 nt, Artificial Sequence
  Description of Artificial Sequence: Synthetic oligonucleotide
  Antisense strand to SEQ ID NO: 2576608
auaauuaaagagcaaucca

SEQ ID NO: 2576610 - RNA, 19 nt, Artificial Sequence
  Description of Artificial Sequence: Synthetic oligonucleotide
  Sense strand starting at position 2882 of SEQ ID NO: 1889060
aauuauagcucuguguuag

SEQ ID NO: 2576611 - RNA, 19 nt, Artificial Sequence
  Description of Artificial Sequence: Synthetic oligonucleotide
  Antisense strand to SEQ ID NO: 2576610
cuaacacagagcuauaauu

SEQ ID NO: 2576612 - RNA, 19 nt, Artificial Sequence
  Description of Artificial Sequence: Synthetic oligonucleotide
  Sense strand starting at position 2883 of SEQ ID NO: 1889060
auuauagcucuguguuaga

SEQ ID NO: 2576613 - RNA, 19 nt, Artificial Sequence
  Description of Artificial Sequence: Synthetic oligonucleotide
  Antisense strand to SEQ ID NO: 2576612
ucuaacacagagcuauaau

SEQ ID NO: 2576614 - RNA, 19 nt, Artificial Sequence
  Description of Artificial Sequence: Synthetic oligonucleotide
  Sense strand starting at position 2892 of SEQ ID NO: 1889060
cuguguuagaauuaguagu

SEQ ID NO: 2576615 - RNA, 19 nt, Artificial Sequence
  Description of Artificial Sequence: Synthetic oligonucleotide
  Antisense strand to SEQ ID NO: 2576614
acuacuaauucuaacacag

SEQ ID NO: 2576616 - RNA, 19 nt, Artificial Sequence
  Description of Artificial Sequence: Synthetic oligonucleotide
  Sense strand starting at position 2894 of SEQ ID NO: 1889060
guguuagaauuaguaguau

SEQ ID NO: 2576617 - RNA, 19 nt, Artificial Sequence
  Description of Artificial Sequence: Synthetic oligonucleotide
  Antisense strand to SEQ ID NO: 2576616
auacuacuaauucuaacac

SEQ ID NO: 2576618 - RNA, 19 nt, Artificial Sequence
  Description of Artificial Sequence: Synthetic oligonucleotide
  Sense strand starting at position 2925 of SEQ ID NO: 1889060
aaguauuucuguguguaga

SEQ ID NO: 2576619 - RNA, 19 nt, Artificial Sequence
  Description of Artificial Sequence: Synthetic oligonucleotide
  Antisense strand to SEQ ID NO: 2576618
ucuacacacagaaauacuu

SEQ ID NO: 2576620 - RNA, 19 nt, Artificial Sequence
  Description of Artificial Sequence: Synthetic oligonucleotide
  Sense strand starting at position 2926 of SEQ ID NO: 1889060
aguauuucuguguguagaa

SEQ ID NO: 2576621 - RNA, 19 nt, Artificial Sequence
  Description of Artificial Sequence: Synthetic oligonucleotide
  Antisense strand to SEQ ID NO: 2576620
uucuacacacagaaauacu

SEQ ID NO: 2576622 - RNA, 19 nt, Artificial Sequence
  Description of Artificial Sequence: Synthetic oligonucleotide
  Sense strand starting at position 2927 of SEQ ID NO: 1889060
guauuucuguguguagaaa

SEQ ID NO: 2576623 - RNA, 19 nt, Artificial Sequence
  Description of Artificial Sequence: Synthetic oligonucleotide
  Antisense strand to SEQ ID NO: 2576622
uuucuacacacagaaauac

SEQ ID NO: 2576624 - RNA, 19 nt, Artificial Sequence
  Description of Artificial Sequence: Synthetic oligonucleotide
  Sense strand starting at position 2986 of SEQ ID NO: 1889060
aggagauguuauguuuaca

SEQ ID NO: 2576625 - RNA, 19 nt, Artificial Sequence
  Description of Artificial Sequence: Synthetic oligonucleotide
  Antisense strand to SEQ ID NO: 2576624
uguaaacauaacaucuccu

SEQ ID NO: 2576626 - RNA, 19 nt, Artificial Sequence
  Description of Artificial Sequence: Synthetic oligonucleotide
  Sense strand starting at position 3062 of SEQ ID NO: 1889060
gggugauaauuaguuacuc

SEQ ID NO: 2576627 - RNA, 19 nt, Artificial Sequence
  Description of Artificial Sequence: Synthetic oligonucleotide
  Antisense strand to SEQ ID NO: 2576626
gaguaacuaauuaucaccc

SEQ ID NO: 2576628 - RNA, 19 nt, Artificial Sequence
  Description of Artificial Sequence: Synthetic oligonucleotide
  Sense strand starting at position 3282 of SEQ ID NO: 1889060
ugauauagcuaguuaucau

SEQ ID NO: 2576629 - RNA, 19 nt, Artificial Sequence
  Description of Artificial Sequence: Synthetic oligonucleotide
  Antisense strand to SEQ ID NO: 2576628
augauaacuagcuauauca

SEQ ID NO: 2576630 - RNA, 19 nt, Artificial Sequence
  Description of Artificial Sequence: Synthetic oligonucleotide
  Sense strand starting at position 3371 of SEQ ID NO: 1889060
cuuaucagguuuccuagaa

SEQ ID NO: 2576631 - RNA, 19 nt, Artificial Sequence
  Description of Artificial Sequence: Synthetic oligonucleotide
  Antisense strand to SEQ ID NO: 2576630
uucuaggaaaccugauaag

SEQ ID NO: 2576632 - RNA, 19 nt, Artificial Sequence
  Description of Artificial Sequence: Synthetic oligonucleotide
  Sense strand starting at position 3372 of SEQ ID NO: 1889060
uuaucagguuuccuagaaa

SEQ ID NO: 2576633 - RNA, 19 nt, Artificial Sequence
  Description of Artificial Sequence: Synthetic oligonucleotide
  Antisense strand to SEQ ID NO: 2576632
uuucuaggaaaccugauaa

SEQ ID NO: 2576634 - RNA, 19 nt, Artificial Sequence
  Description of Artificial Sequence: Synthetic oligonucleotide
  Sense strand starting at position 3571 of SEQ ID NO: 1889060
uuacuuuguagugaaguca

SEQ ID NO: 2576635 - RNA, 19 nt, Artificial Sequence
  Description of Artificial Sequence: Synthetic oligonucleotide
  Antisense strand to SEQ ID NO: 2576634
ugacuucacuacaaaguaa

SEQ ID NO: 2576636 - RNA, 19 nt, Artificial Sequence
  Description of Artificial Sequence: Synthetic oligonucleotide
  Sense strand starting at position 3580 of SEQ ID NO: 1889060
agugaagucaaaugaagcu

SEQ ID NO: 2576637 - RNA, 19 nt, Artificial Sequence
  Description of Artificial Sequence: Synthetic oligonucleotide
  Antisense strand to SEQ ID NO: 2576636
agcuucauuugacuucacu

SEQ ID NO: 2576638 - RNA, 19 nt, Artificial Sequence
  Description of Artificial Sequence: Synthetic oligonucleotide
  Sense strand starting at position 3838 of SEQ ID NO: 1889060
agcacauuauggucccaau

SEQ ID NO: 2576639 - RNA, 19 nt, Artificial Sequence
  Description of Artificial Sequence: Synthetic oligonucleotide
  Antisense strand to SEQ ID NO: 2576638
auugggaccauaaugugcu

SEQ ID NO: 2576640 - RNA, 19 nt, Artificial Sequence
  Description of Artificial Sequence: Synthetic oligonucleotide
  Sense strand starting at position 3933 of SEQ ID NO: 1889060
uugauaucuguaugccaga

SEQ ID NO: 2576641 - RNA, 19 nt, Artificial Sequence
  Description of Artificial Sequence: Synthetic oligonucleotide
  Antisense strand to SEQ ID NO: 2576640
ucuggcauacagauaucaa

SEQ ID NO: 2576642 - RNA, 19 nt, Artificial Sequence
  Description of Artificial Sequence: Synthetic oligonucleotide
  Sense strand starting at position 3934 of SEQ ID NO: 1889060
ugauaucuguaugccagaa

SEQ ID NO: 2576643 - RNA, 19 nt, Artificial Sequence
  Description of Artificial Sequence: Synthetic oligonucleotide
  Antisense strand to SEQ ID NO: 2576642
uucuggcauacagauauca

SEQ ID NO: 2576644 - RNA, 19 nt, Artificial Sequence
  Description of Artificial Sequence: Synthetic oligonucleotide
  Sense strand starting at position 3960 of SEQ ID NO: 1889060
uugcaauuagauggauaaa

SEQ ID NO: 2576645 - RNA, 19 nt, Artificial Sequence
  Description of Artificial Sequence: Synthetic oligonucleotide
  Antisense strand to SEQ ID NO: 2576644
uuuauccaucuaauugcaa

SEQ ID NO: 2576646 - RNA, 19 nt, Artificial Sequence
  Description of Artificial Sequence: Synthetic oligonucleotide
  Sense strand starting at position 368 of SEQ ID NO: 1889061
uuugguaggcucugagaag

SEQ ID NO: 2576647 - RNA, 19 nt, Artificial Sequence
  Description of Artificial Sequence: Synthetic oligonucleotide
  Antisense strand to SEQ ID NO: 2576646
cuucucagagccuaccaaa

SEQ ID NO: 2576648 - RNA, 19 nt, Artificial Sequence
  Description of Artificial Sequence: Synthetic oligonucleotide
  Sense strand starting at position 388 of SEQ ID NO: 1889061
caaagaagguugcugagua

SEQ ID NO: 2576649 - RNA, 19 nt, Artificial Sequence
  Description of Artificial Sequence: Synthetic oligonucleotide
  Antisense strand to SEQ ID NO: 2576648
uacucagcaaccuucuuug

SEQ ID NO: 2576650 - RNA, 19 nt, Artificial Sequence
  Description of Artificial Sequence: Synthetic oligonucleotide
  Sense strand starting at position 420 of SEQ ID NO: 1889061
aucaaagauguauguuaug

SEQ ID NO: 2576651 - RNA, 19 nt, Artificial Sequence
  Description of Artificial Sequence: Synthetic oligonucleotide
  Antisense strand to SEQ ID NO: 2576650
cauaacauacaucuuugau

SEQ ID NO: 2576652 - RNA, 19 nt, Artificial Sequence
  Description of Artificial Sequence: Synthetic oligonucleotide
  Sense strand starting at position 435 of SEQ ID NO: 1889061
uaugaagauugauuguaca

SEQ ID NO: 2576653 - RNA, 19 nt, Artificial Sequence
  Description of Artificial Sequence: Synthetic oligonucleotide
  Antisense strand to SEQ ID NO: 2576652
uguacaaucaaucuucaua

SEQ ID NO: 2576654 - RNA, 19 nt, Artificial Sequence
  Description of Artificial Sequence: Synthetic oligonucleotide
  Sense strand starting at position 443 of SEQ ID NO: 1889061
uugauuguacaguaaugua

SEQ ID NO: 2576655 - RNA, 19 nt, Artificial Sequence
  Description of Artificial Sequence: Synthetic oligonucleotide
  Antisense strand to SEQ ID NO: 2576654
uacauuacuguacaaucaa

SEQ ID NO: 2576656 - RNA, 19 nt, Artificial Sequence
  Description of Artificial Sequence: Synthetic oligonucleotide
  Sense strand starting at position 523 of SEQ ID NO: 1889061
aagacaagguuucuagagu

SEQ ID NO: 2576657 - RNA, 19 nt, Artificial Sequence
  Description of Artificial Sequence: Synthetic oligonucleotide
  Antisense strand to SEQ ID NO: 2576656
acucuagaaaccuugucuu

SEQ ID NO: 2576658 - RNA, 19 nt, Artificial Sequence
  Description of Artificial Sequence: Synthetic oligonucleotide
  Sense strand starting at position 633 of SEQ ID NO: 1889061
uugauaugcugcucauuua

SEQ ID NO: 2576659 - RNA, 19 nt, Artificial Sequence
  Description of Artificial Sequence: Synthetic oligonucleotide
  Antisense strand to SEQ ID NO: 2576658
uaaaugagcagcauaucaa

SEQ ID NO: 2576660 - RNA, 19 nt, Artificial Sequence
  Description of Artificial Sequence: Synthetic oligonucleotide
  Sense strand starting at position 770 of SEQ ID NO: 1889061
cuacauugguuugugggau

SEQ ID NO: 2576661 - RNA, 19 nt, Artificial Sequence
  Description of Artificial Sequence: Synthetic oligonucleotide
  Antisense strand to SEQ ID NO: 2576660
aucccacaaaccaauguag

SEQ ID NO: 2576662 - RNA, 19 nt, Artificial Sequence
  Description of Artificial Sequence: Synthetic oligonucleotide
  Sense strand starting at position 813 of SEQ ID NO: 1889061
ggcucccuuugauccauua

SEQ ID NO: 2576663 - RNA, 19 nt, Artificial Sequence
  Description of Artificial Sequence: Synthetic oligonucleotide
  Antisense strand to SEQ ID NO: 2576662
uaauggaucaaagggagcc

SEQ ID NO: 2576664 - RNA, 19 nt, Artificial Sequence
  Description of Artificial Sequence: Synthetic oligonucleotide
  Sense strand starting at position 860 of SEQ ID NO: 1889061
augauaagaguuggacgau

SEQ ID NO: 2576665 - RNA, 19 nt, Artificial Sequence
  Description of Artificial Sequence: Synthetic oligonucleotide
  Antisense strand to SEQ ID NO: 2576664
aucguccaacucuuaucau

SEQ ID NO: 2576666 - RNA, 19 nt, Artificial Sequence
  Description of Artificial Sequence: Synthetic oligonucleotide
  Sense strand starting at position 866 of SEQ ID NO: 1889061
agaguuggacgauaagcuu

SEQ ID NO: 2576667 - RNA, 19 nt, Artificial Sequence
  Description of Artificial Sequence: Synthetic oligonucleotide
  Antisense strand to SEQ ID NO: 2576666
aagcuuaucguccaacucu

SEQ ID NO: 2576668 - RNA, 19 nt, Artificial Sequence
  Description of Artificial Sequence: Synthetic oligonucleotide
  Sense strand starting at position 1009 of SEQ ID NO: 1889061
gugauuggugguagugcau

SEQ ID NO: 2576669 - RNA, 19 nt, Artificial Sequence
  Description of Artificial Sequence: Synthetic oligonucleotide
  Antisense strand to SEQ ID NO: 2576668
augcacuaccaccaaucac

SEQ ID NO: 2576670 - RNA, 19 nt, Artificial Sequence
  Description of Artificial Sequence: Synthetic oligonucleotide
  Sense strand starting at position 1051 of SEQ ID NO: 1889061
ggguuauagguuuaccaug

SEQ ID NO: 2576671 - RNA, 19 nt, Artificial Sequence
  Description of Artificial Sequence: Synthetic oligonucleotide
  Antisense strand to SEQ ID NO: 2576670
caugguaaaccuauaaccc

SEQ ID NO: 2576672 - RNA, 19 nt, Artificial Sequence
  Description of Artificial Sequence: Synthetic oligonucleotide
  Sense strand starting at position 1058 of SEQ ID NO: 1889061
agguuuaccauguggacaa

SEQ ID NO: 2576673 - RNA, 19 nt, Artificial Sequence
  Description of Artificial Sequence: Synthetic oligonucleotide
  Antisense strand to SEQ ID NO: 2576672
uuguccacaugguaaaccu

SEQ ID NO: 2576674 - RNA, 19 nt, Artificial Sequence
  Description of Artificial Sequence: Synthetic oligonucleotide
  Sense strand starting at position 1099 of SEQ ID NO: 1889061
gaguuuaccugccuggaau

SEQ ID NO: 2576675 - RNA, 19 nt, Artificial Sequence
  Description of Artificial Sequence: Synthetic oligonucleotide
  Antisense strand to SEQ ID NO: 2576674
auuccaggcagguaaacuc

SEQ ID NO: 2576676 - RNA, 19 nt, Artificial Sequence
  Description of Artificial Sequence: Synthetic oligonucleotide
  Sense strand starting at position 1124 of SEQ ID NO: 1889061
ggaguugucuuuccuggga

SEQ ID NO: 2576677 - RNA, 19 nt, Artificial Sequence
  Description of Artificial Sequence: Synthetic oligonucleotide
  Antisense strand to SEQ ID NO: 2576676
ucccaggaaagacaacucc

SEQ ID NO: 2576678 - RNA, 19 nt, Artificial Sequence
  Description of Artificial Sequence: Synthetic oligonucleotide
  Sense strand starting at position 1127 of SEQ ID NO: 1889061
guugucuuuccugggagag

SEQ ID NO: 2576679 - RNA, 19 nt, Artificial Sequence
  Description of Artificial Sequence: Synthetic oligonucleotide
  Antisense strand to SEQ ID NO: 2576678
cucucccaggaaagacaac

SEQ ID NO: 2576680 - RNA, 19 nt, Artificial Sequence
  Description of Artificial Sequence: Synthetic oligonucleotide
  Sense strand starting at position 1193 of SEQ ID NO: 1889061
auguuagacaccggaacuu

SEQ ID NO: 2576681 - RNA, 19 nt, Artificial Sequence
  Description of Artificial Sequence: Synthetic oligonucleotide
  Antisense strand to SEQ ID NO: 2576680
aaguuccggugucuaacau

SEQ ID NO: 2576682 - RNA, 19 nt, Artificial Sequence
  Description of Artificial Sequence: Synthetic oligonucleotide
  Sense strand starting at position 1219 of SEQ ID NO: 1889061
gaagguuggcguucgaguu

SEQ ID NO: 2576683 - RNA, 19 nt, Artificial Sequence
  Description of Artificial Sequence: Synthetic oligonucleotide
  Antisense strand to SEQ ID NO: 2576682
aacucgaacgccaaccuuc

SEQ ID NO: 2576684 - RNA, 19 nt, Artificial Sequence
  Description of Artificial Sequence: Synthetic oligonucleotide
  Sense strand starting at position 1415 of SEQ ID NO: 1889061
cuuacuugucacggaugau

SEQ ID NO: 2576685 - RNA, 19 nt, Artificial Sequence
  Description of Artificial Sequence: Synthetic oligonucleotide
  Antisense strand to SEQ ID NO: 2576684
aucauccgugacaaguaag

SEQ ID NO: 2576686 - RNA, 19 nt, Artificial Sequence
  Description of Artificial Sequence: Synthetic oligonucleotide
  Sense strand starting at position 1416 of SEQ ID NO: 1889061
uuacuugucacggaugaug

SEQ ID NO: 2576687 - RNA, 19 nt, Artificial Sequence
  Description of Artificial Sequence: Synthetic oligonucleotide
  Antisense strand to SEQ ID NO: 2576686
caucauccgugacaaguaa

SEQ ID NO: 2576688 - RNA, 19 nt, Artificial Sequence
  Description of Artificial Sequence: Synthetic oligonucleotide
  Sense strand starting at position 2176 of SEQ ID NO: 1889061
ucagaacuuugggugauua

SEQ ID NO: 2576689 - RNA, 19 nt, Artificial Sequence
  Description of Artificial Sequence: Synthetic oligonucleotide
  Antisense strand to SEQ ID NO: 2576688
uaaucacccaaaguucuga

SEQ ID NO: 2576690 - RNA, 19 nt, Artificial Sequence
  Description of Artificial Sequence: Synthetic oligonucleotide
  Sense strand starting at position 2178 of SEQ ID NO: 1889061
agaacuuugggugauuagu

SEQ ID NO: 2576691 - RNA, 19 nt, Artificial Sequence
  Description of Artificial Sequence: Synthetic oligonucleotide
  Antisense strand to SEQ ID NO: 2576690
acuaaucacccaaaguucu

SEQ ID NO: 2576692 - RNA, 19 nt, Artificial Sequence
  Description of Artificial Sequence: Synthetic oligonucleotide
  Sense strand starting at position 2262 of SEQ ID NO: 1889061
cagacuuugugaccuagca

SEQ ID NO: 2576693 - RNA, 19 nt, Artificial Sequence
  Description of Artificial Sequence: Synthetic oligonucleotide
  Antisense strand to SEQ ID NO: 2576692
ugcuaggucacaaagucug

SEQ ID NO: 2576694 - RNA, 19 nt, Artificial Sequence
  Description of Artificial Sequence: Synthetic oligonucleotide
  Sense strand starting at position 2313 of SEQ ID NO: 1889061
uuagcuugucugcauaaca

SEQ ID NO: 2576695 - RNA, 19 nt, Artificial Sequence
  Description of Artificial Sequence: Synthetic oligonucleotide
  Antisense strand to SEQ ID NO: 2576694
uguuaugcagacaagcuaa

SEQ ID NO: 2576696 - RNA, 19 nt, Artificial Sequence
  Description of Artificial Sequence: Synthetic oligonucleotide
  Sense strand starting at position 2370 of SEQ ID NO: 1889061
gaggcuguccucuacuaga

SEQ ID NO: 2576697 - RNA, 19 nt, Artificial Sequence
  Description of Artificial Sequence: Synthetic oligonucleotide
  Antisense strand to SEQ ID NO: 2576696
ucuaguagaggacagccuc

SEQ ID NO: 2576698 - RNA, 19 nt, Artificial Sequence
  Description of Artificial Sequence: Synthetic oligonucleotide
  Sense strand starting at position 2378 of SEQ ID NO: 1889061
ccucuacuagacuguucua

SEQ ID NO: 2576699 - RNA, 19 nt, Artificial Sequence
  Description of Artificial Sequence: Synthetic oligonucleotide
  Antisense strand to SEQ ID NO: 2576698
uagaacagucuaguagagg

SEQ ID NO: 2576700 - RNA, 19 nt, Artificial Sequence
  Description of Artificial Sequence: Synthetic oligonucleotide
  Sense strand starting at position 2381 of SEQ ID NO: 1889061
cuacuagacuguucuagaa

SEQ ID NO: 2576701 - RNA, 19 nt, Artificial Sequence
  Description of Artificial Sequence: Synthetic oligonucleotide
  Antisense strand to SEQ ID NO: 2576700
uucuagaacagucuaguag

SEQ ID NO: 2576702 - RNA, 19 nt, Artificial Sequence
  Description of Artificial Sequence: Synthetic oligonucleotide
  Sense strand starting at position 2521 of SEQ ID NO: 1889061
ucuuuaaaguacuuggaaa

SEQ ID NO: 2576703 - RNA, 19 nt, Artificial Sequence
  Description of Artificial Sequence: Synthetic oligonucleotide
  Antisense strand to SEQ ID NO: 2576702
uuuccaaguacuuuaaaga

SEQ ID NO: 2576704 - RNA, 19 nt, Artificial Sequence
  Description of Artificial Sequence: Synthetic oligonucleotide
  Sense strand starting at position 2567 of SEQ ID NO: 1889061
acuauaacggccugaggua

SEQ ID NO: 2576705 - RNA, 19 nt, Artificial Sequence
  Description of Artificial Sequence: Synthetic oligonucleotide
  Antisense strand to SEQ ID NO: 2576704
uaccucaggccguuauagu

SEQ ID NO: 2576706 - RNA, 19 nt, Artificial Sequence
  Description of Artificial Sequence: Synthetic oligonucleotide
  Sense strand starting at position 2632 of SEQ ID NO: 1889061
aauuguagagcuuguuaaa

SEQ ID NO: 2576707 - RNA, 19 nt, Artificial Sequence
  Description of Artificial Sequence: Synthetic oligonucleotide
  Antisense strand to SEQ ID NO: 2576706
uuuaacaagcucuacaauu

SEQ ID NO: 2576708 - RNA, 19 nt, Artificial Sequence
  Description of Artificial Sequence: Synthetic oligonucleotide
  Sense strand starting at position 2674 of SEQ ID NO: 1889061
uugagauugugauucugua

SEQ ID NO: 2576709 - RNA, 19 nt, Artificial Sequence
  Description of Artificial Sequence: Synthetic oligonucleotide
  Antisense strand to SEQ ID NO: 2576708
uacagaaucacaaucucaa

SEQ ID NO: 2576710 - RNA, 19 nt, Artificial Sequence
  Description of Artificial Sequence: Synthetic oligonucleotide
  Sense strand starting at position 2678 of SEQ ID NO: 1889061
gauugugauucuguagauc

SEQ ID NO: 2576711 - RNA, 19 nt, Artificial Sequence
  Description of Artificial Sequence: Synthetic oligonucleotide
  Antisense strand to SEQ ID NO: 2576710
gaucuacagaaucacaauc

SEQ ID NO: 2576712 - RNA, 19 nt, Artificial Sequence
  Description of Artificial Sequence: Synthetic oligonucleotide
  Sense strand starting at position 2681 of SEQ ID NO: 1889061
ugugauucuguagauccga

SEQ ID NO: 2576713 - RNA, 19 nt, Artificial Sequence
  Description of Artificial Sequence: Synthetic oligonucleotide
  Antisense strand to SEQ ID NO: 2576712
ucggaucuacagaaucaca

SEQ ID NO: 2576714 - RNA, 19 nt, Artificial Sequence
  Description of Artificial Sequence: Synthetic oligonucleotide
  Sense strand starting at position 2690 of SEQ ID NO: 1889061
guagauccgagaugggaua

SEQ ID NO: 2576715 - RNA, 19 nt, Artificial Sequence
  Description of Artificial Sequence: Synthetic oligonucleotide
  Antisense strand to SEQ ID NO: 2576714
uaucccaucucggaucuac

SEQ ID NO: 2576716 - RNA, 19 nt, Artificial Sequence
  Description of Artificial Sequence: Synthetic oligonucleotide
  Sense strand starting at position 3117 of SEQ ID NO: 1889061
uaucauuaauggguaguua

SEQ ID NO: 2576717 - RNA, 19 nt, Artificial Sequence
  Description of Artificial Sequence: Synthetic oligonucleotide
  Antisense strand to SEQ ID NO: 2576716
uaacuacccauuaaugaua

SEQ ID NO: 2576718 - RNA, 19 nt, Artificial Sequence
  Description of Artificial Sequence: Synthetic oligonucleotide
  Sense strand starting at position 3125 of SEQ ID NO: 1889061
auggguaguuagguugauu

SEQ ID NO: 2576719 - RNA, 19 nt, Artificial Sequence
  Description of Artificial Sequence: Synthetic oligonucleotide
  Antisense strand to SEQ ID NO: 2576718
aaucaaccuaacuacccau

SEQ ID NO: 2576720 - RNA, 19 nt, Artificial Sequence
  Description of Artificial Sequence: Synthetic oligonucleotide
  Sense strand starting at position 3128 of SEQ ID NO: 1889061
gguaguuagguugauucca

SEQ ID NO: 2576721 - RNA, 19 nt, Artificial Sequence
  Description of Artificial Sequence: Synthetic oligonucleotide
  Antisense strand to SEQ ID NO: 2576720
uggaaucaaccuaacuacc

SEQ ID NO: 2576722 - RNA, 19 nt, Artificial Sequence
  Description of Artificial Sequence: Synthetic oligonucleotide
  Sense strand starting at position 3161 of SEQ ID NO: 1889061
uaaauagugcuggaguuaa

SEQ ID NO: 2576723 - RNA, 19 nt, Artificial Sequence
  Description of Artificial Sequence: Synthetic oligonucleotide
  Antisense strand to SEQ ID NO: 2576722
uuaacuccagcacuauuua

SEQ ID NO: 2576724 - RNA, 19 nt, Artificial Sequence
  Description of Artificial Sequence: Synthetic oligonucleotide
  Sense strand starting at position 3515 of SEQ ID NO: 1889061
cuuuguauccaucauagcu

SEQ ID NO: 2576725 - RNA, 19 nt, Artificial Sequence
  Description of Artificial Sequence: Synthetic oligonucleotide
  Antisense strand to SEQ ID NO: 2576724
agcuaugauggauacaaag

SEQ ID NO: 2576726 - RNA, 19 nt, Artificial Sequence
  Description of Artificial Sequence: Synthetic oligonucleotide
  Sense strand starting at position 32 of SEQ ID NO: 1889062
ugagaugccucaguucuag

SEQ ID NO: 2576727 - RNA, 19 nt, Artificial Sequence
  Description of Artificial Sequence: Synthetic oligonucleotide
  Antisense strand to SEQ ID NO: 2576726
cuagaacugaggcaucuca

SEQ ID NO: 2576728 - RNA, 19 nt, Artificial Sequence
  Description of Artificial Sequence: Synthetic oligonucleotide
  Sense strand starting at position 67 of SEQ ID NO: 1889062
cacaguagaugucugaaca

SEQ ID NO: 2576729 - RNA, 19 nt, Artificial Sequence
  Description of Artificial Sequence: Synthetic oligonucleotide
  Antisense strand to SEQ ID NO: 2576728
uguucagacaucuacugug

SEQ ID NO: 2576730 - RNA, 19 nt, Artificial Sequence
  Description of Artificial Sequence: Synthetic oligonucleotide
  Sense strand starting at position 68 of SEQ ID NO: 1889062
acaguagaugucugaacaa

SEQ ID NO: 2576731 - RNA, 19 nt, Artificial Sequence
  Description of Artificial Sequence: Synthetic oligonucleotide
  Antisense strand to SEQ ID NO: 2576730
uuguucagacaucuacugu

SEQ ID NO: 2576732 - RNA, 19 nt, Artificial Sequence
  Description of Artificial Sequence: Synthetic oligonucleotide
  Sense strand starting at position 280 of SEQ ID NO: 1889062
ucaagugauuuaguugucu

SEQ ID NO: 2576733 - RNA, 19 nt, Artificial Sequence
  Description of Artificial Sequence: Synthetic oligonucleotide
  Antisense strand to SEQ ID NO: 2576732
agacaacuaaaucacuuga

SEQ ID NO: 2576734 - RNA, 19 nt, Artificial Sequence
  Description of Artificial Sequence: Synthetic oligonucleotide
  Sense strand starting at position 385 of SEQ ID NO: 1889062
gugguuccuagggaauaug

SEQ ID NO: 2576735 - RNA, 19 nt, Artificial Sequence
  Description of Artificial Sequence: Synthetic oligonucleotide
  Antisense strand to SEQ ID NO: 2576734
cauauucccuaggaaccac

SEQ ID NO: 2576736 - RNA, 19 nt, Artificial Sequence
  Description of Artificial Sequence: Synthetic oligonucleotide
  Sense strand starting at position 449 of SEQ ID NO: 1889062
acacauuucucguugcuuu

SEQ ID NO: 2576737 - RNA, 19 nt, Artificial Sequence
  Description of Artificial Sequence: Synthetic oligonucleotide
  Antisense strand to SEQ ID NO: 2576736
aaagcaacgagaaaugugu

SEQ ID NO: 2576738 - RNA, 19 nt, Artificial Sequence
  Description of Artificial Sequence: Synthetic oligonucleotide
  Sense strand starting at position 453 of SEQ ID NO: 1889062
auuucucguugcuuuacaa

SEQ ID NO: 2576739 - RNA, 19 nt, Artificial Sequence
  Description of Artificial Sequence: Synthetic oligonucleotide
  Antisense strand to SEQ ID NO: 2576738
uuguaaagcaacgagaaau

SEQ ID NO: 2576740 - RNA, 19 nt, Artificial Sequence
  Description of Artificial Sequence: Synthetic oligonucleotide
  Sense strand starting at position 978 of SEQ ID NO: 1889062
ggccaaugauucuaauuua

SEQ ID NO: 2576741 - RNA, 19 nt, Artificial Sequence
  Description of Artificial Sequence: Synthetic oligonucleotide
  Antisense strand to SEQ ID NO: 2576740
uaaauuagaaucauuggcc

SEQ ID NO: 2576742 - RNA, 19 nt, Artificial Sequence
  Description of Artificial Sequence: Synthetic oligonucleotide
  Sense strand starting at position 1168 of SEQ ID NO: 1889062
auguuagcacaggaguaua

SEQ ID NO: 2576743 - RNA, 19 nt, Artificial Sequence
  Description of Artificial Sequence: Synthetic oligonucleotide
  Antisense strand to SEQ ID NO: 2576742
uauacuccugugcuaacau

SEQ ID NO: 2576744 - RNA, 19 nt, Artificial Sequence
  Description of Artificial Sequence: Synthetic oligonucleotide
  Sense strand starting at position 1193 of SEQ ID NO: 1889062
acuuaaguauaccuauguu

SEQ ID NO: 2576745 - RNA, 19 nt, Artificial Sequence
  Description of Artificial Sequence: Synthetic oligonucleotide
  Antisense strand to SEQ ID NO: 2576744
aacauagguauacuuaagu

SEQ ID NO: 2576746 - RNA, 19 nt, Artificial Sequence
  Description of Artificial Sequence: Synthetic oligonucleotide
  Sense strand starting at position 1196 of SEQ ID NO: 1889062
uaaguauaccuauguugga

SEQ ID NO: 2576747 - RNA, 19 nt, Artificial Sequence
  Description of Artificial Sequence: Synthetic oligonucleotide
  Antisense strand to SEQ ID NO: 2576746
uccaacauagguauacuua

SEQ ID NO: 2576748 - RNA, 19 nt, Artificial Sequence
  Description of Artificial Sequence: Synthetic oligonucleotide
  Sense strand starting at position 1260 of SEQ ID NO: 1889062
cuauuuggauagcagugaa

SEQ ID NO: 2576749 - RNA, 19 nt, Artificial Sequence
  Description of Artificial Sequence: Synthetic oligonucleotide
  Antisense strand to SEQ ID NO: 2576748
uucacugcuauccaaauag

SEQ ID NO: 2576750 - RNA, 19 nt, Artificial Sequence
  Description of Artificial Sequence: Synthetic oligonucleotide
  Sense strand starting at position 1348 of SEQ ID NO: 1889062
gcuauaacucauggaaguu

SEQ ID NO: 2576751 - RNA, 19 nt, Artificial Sequence
  Description of Artificial Sequence: Synthetic oligonucleotide
  Antisense strand to SEQ ID NO: 2576750
aacuuccaugaguuauagc

SEQ ID NO: 2576752 - RNA, 19 nt, Artificial Sequence
  Description of Artificial Sequence: Synthetic oligonucleotide
  Sense strand starting at position 1513 of SEQ ID NO: 1889062
caguauaagguuuggaaua

SEQ ID NO: 2576753 - RNA, 19 nt, Artificial Sequence
  Description of Artificial Sequence: Synthetic oligonucleotide
  Antisense strand to SEQ ID NO: 2576752
uauuccaaaccuuauacug

SEQ ID NO: 2576754 - RNA, 19 nt, Artificial Sequence
  Description of Artificial Sequence: Synthetic oligonucleotide
  Sense strand starting at position 1524 of SEQ ID NO: 1889062
uuggaauaacuccagccau

SEQ ID NO: 2576755 - RNA, 19 nt, Artificial Sequence
  Description of Artificial Sequence: Synthetic oligonucleotide
  Antisense strand to SEQ ID NO: 2576754
auggcuggaguuauuccaa

SEQ ID NO: 2576756 - RNA, 19 nt, Artificial Sequence
  Description of Artificial Sequence: Synthetic oligonucleotide
  Sense strand starting at position 1912 of SEQ ID NO: 1889062
ugaauccugcaguauugua

SEQ ID NO: 2576757 - RNA, 19 nt, Artificial Sequence
  Description of Artificial Sequence: Synthetic oligonucleotide
  Antisense strand to SEQ ID NO: 2576756
uacaauacugcaggauuca

SEQ ID NO: 2576758 - RNA, 19 nt, Artificial Sequence
  Description of Artificial Sequence: Synthetic oligonucleotide
  Sense strand starting at position 2211 of SEQ ID NO: 1889062
ccaggaauauuacaaagaa

SEQ ID NO: 2576759 - RNA, 19 nt, Artificial Sequence
  Description of Artificial Sequence: Synthetic oligonucleotide
  Antisense strand to SEQ ID NO: 2576758
uucuuuguaauauuccugg

SEQ ID NO: 2576760 - RNA, 19 nt, Artificial Sequence
  Description of Artificial Sequence: Synthetic oligonucleotide
  Sense strand starting at position 2372 of SEQ ID NO: 1889062
guguguauuuccucagaau

SEQ ID NO: 2576761 - RNA, 19 nt, Artificial Sequence
  Description of Artificial Sequence: Synthetic oligonucleotide
  Antisense strand to SEQ ID NO: 2576760
auucugaggaaauacacac

SEQ ID NO: 2576762 - RNA, 19 nt, Artificial Sequence
  Description of Artificial Sequence: Synthetic oligonucleotide
  Sense strand starting at position 2375 of SEQ ID NO: 1889062
uguauuuccucagaaugau

SEQ ID NO: 2576763 - RNA, 19 nt, Artificial Sequence
  Description of Artificial Sequence: Synthetic oligonucleotide
  Antisense strand to SEQ ID NO: 2576762
aucauucugaggaaauaca

SEQ ID NO: 2576764 - RNA, 19 nt, Artificial Sequence
  Description of Artificial Sequence: Synthetic oligonucleotide
  Sense strand starting at position 2405 of SEQ ID NO: 1889062
auacauccucaguaaaugu

SEQ ID NO: 2576765 - RNA, 19 nt, Artificial Sequence
  Description of Artificial Sequence: Synthetic oligonucleotide
  Antisense strand to SEQ ID NO: 2576764
acauuuacugaggauguau

SEQ ID NO: 2576766 - RNA, 19 nt, Artificial Sequence
  Description of Artificial Sequence: Synthetic oligonucleotide
  Sense strand starting at position 2412 of SEQ ID NO: 1889062
cucaguaaaugugucacaa

SEQ ID NO: 2576767 - RNA, 19 nt, Artificial Sequence
  Description of Artificial Sequence: Synthetic oligonucleotide
  Antisense strand to SEQ ID NO: 2576766
uugugacacauuuacugag

SEQ ID NO: 2576768 - RNA, 19 nt, Artificial Sequence
  Description of Artificial Sequence: Synthetic oligonucleotide
  Sense strand starting at position 2517 of SEQ ID NO: 1889062
uuucuuuccuuggucaaag

SEQ ID NO: 2576769 - RNA, 19 nt, Artificial Sequence
  Description of Artificial Sequence: Synthetic oligonucleotide
  Antisense strand to SEQ ID NO: 2576768
cuuugaccaaggaaagaaa

SEQ ID NO: 2576770 - RNA, 19 nt, Artificial Sequence
  Description of Artificial Sequence: Synthetic oligonucleotide
  Sense strand starting at position 2535 of SEQ ID NO: 1889062
gugcuaauccaagaugaug

SEQ ID NO: 2576771 - RNA, 19 nt, Artificial Sequence
  Description of Artificial Sequence: Synthetic oligonucleotide
  Antisense strand to SEQ ID NO: 2576770
caucaucuuggauuagcac

SEQ ID NO: 2576772 - RNA, 19 nt, Artificial Sequence
  Description of Artificial Sequence: Synthetic oligonucleotide
  Sense strand starting at position 2593 of SEQ ID NO: 1889062
ggaacaauuccuugaccuu

SEQ ID NO: 2576773 - RNA, 19 nt, Artificial Sequence
  Description of Artificial Sequence: Synthetic oligonucleotide
  Antisense strand to SEQ ID NO: 2576772
aaggucaaggaauuguucc

SEQ ID NO: 2576774 - RNA, 19 nt, Artificial Sequence
  Description of Artificial Sequence: Synthetic oligonucleotide
  Sense strand starting at position 2681 of SEQ ID NO: 1889062
gacacugauuguguggaaa

SEQ ID NO: 2576775 - RNA, 19 nt, Artificial Sequence
  Description of Artificial Sequence: Synthetic oligonucleotide
  Antisense strand to SEQ ID NO: 2576774
uuuccacacaaucaguguc

SEQ ID NO: 2576776 - RNA, 19 nt, Artificial Sequence
  Description of Artificial Sequence: Synthetic oligonucleotide
  Sense strand starting at position 2742 of SEQ ID NO: 1889062
aaagcuugugaacaaaugu

SEQ ID NO: 2576777 - RNA, 19 nt, Artificial Sequence
  Description of Artificial Sequence: Synthetic oligonucleotide
  Antisense strand to SEQ ID NO: 2576776
acauuuguucacaagcuuu

SEQ ID NO: 2576778 - RNA, 19 nt, Artificial Sequence
  Description of Artificial Sequence: Synthetic oligonucleotide
  Sense strand starting at position 2815 of SEQ ID NO: 1889062
cuggguguucuccaaucca

SEQ ID NO: 2576779 - RNA, 19 nt, Artificial Sequence
  Description of Artificial Sequence: Synthetic oligonucleotide
  Antisense strand to SEQ ID NO: 2576778
uggauuggagaacacccag

SEQ ID NO: 2576780 - RNA, 19 nt, Artificial Sequence
  Description of Artificial Sequence: Synthetic oligonucleotide
  Sense strand starting at position 2898 of SEQ ID NO: 1889062
acgagacugccucaacuuu

SEQ ID NO: 2576781 - RNA, 19 nt, Artificial Sequence
  Description of Artificial Sequence: Synthetic oligonucleotide
  Antisense strand to SEQ ID NO: 2576780
aaaguugaggcagucucgu

SEQ ID NO: 2576782 - RNA, 19 nt, Artificial Sequence
  Description of Artificial Sequence: Synthetic oligonucleotide
  Sense strand starting at position 3086 of SEQ ID NO: 1889062
gagugaggucuggaaggcu

SEQ ID NO: 2576783 - RNA, 19 nt, Artificial Sequence
  Description of Artificial Sequence: Synthetic oligonucleotide
  Antisense strand to SEQ ID NO: 2576782
agccuuccagaccucacuc

SEQ ID NO: 2576784 - RNA, 19 nt, Artificial Sequence
  Description of Artificial Sequence: Synthetic oligonucleotide
  Sense strand starting at position 3155 of SEQ ID NO: 1889062
uggcauguggaugaguuau

SEQ ID NO: 2576785 - RNA, 19 nt, Artificial Sequence
  Description of Artificial Sequence: Synthetic oligonucleotide
  Antisense strand to SEQ ID NO: 2576784
auaacucauccacaugcca

SEQ ID NO: 2576786 - RNA, 19 nt, Artificial Sequence
  Description of Artificial Sequence: Synthetic oligonucleotide
  Sense strand starting at position 3168 of SEQ ID NO: 1889062
aguuauuugucaccuuucu

SEQ ID NO: 2576787 - RNA, 19 nt, Artificial Sequence
  Description of Artificial Sequence: Synthetic oligonucleotide
  Antisense strand to SEQ ID NO: 2576786
agaaaggugacaaauaacu

SEQ ID NO: 2576788 - RNA, 19 nt, Artificial Sequence
  Description of Artificial Sequence: Synthetic oligonucleotide
  Sense strand starting at position 3406 of SEQ ID NO: 1889062
gcaggacucuuucugaaau

SEQ ID NO: 2576789 - RNA, 19 nt, Artificial Sequence
  Description of Artificial Sequence: Synthetic oligonucleotide
  Antisense strand to SEQ ID NO: 2576788
auuucagaaagaguccugc

SEQ ID NO: 2576790 - RNA, 19 nt, Artificial Sequence
  Description of Artificial Sequence: Synthetic oligonucleotide
  Sense strand starting at position 3412 of SEQ ID NO: 1889062
cucuuucugaaaugggagu

SEQ ID NO: 2576791 - RNA, 19 nt, Artificial Sequence
  Description of Artificial Sequence: Synthetic oligonucleotide
  Antisense strand to SEQ ID NO: 2576790
acucccauuucagaaagag

SEQ ID NO: 2576792 - RNA, 19 nt, Artificial Sequence
  Description of Artificial Sequence: Synthetic oligonucleotide
  Sense strand starting at position 3489 of SEQ ID NO: 1889062
ccagaaagcugggugaaga

SEQ ID NO: 2576793 - RNA, 19 nt, Artificial Sequence
  Description of Artificial Sequence: Synthetic oligonucleotide
  Antisense strand to SEQ ID NO: 2576792
ucuucacccagcuuucugg

SEQ ID NO: 2576794 - RNA, 19 nt, Artificial Sequence
  Description of Artificial Sequence: Synthetic oligonucleotide
  Sense strand starting at position 3490 of SEQ ID NO: 1889062
cagaaagcugggugaagau

SEQ ID NO: 2576795 - RNA, 19 nt, Artificial Sequence
  Description of Artificial Sequence: Synthetic oligonucleotide
  Antisense strand to SEQ ID NO: 2576794
aucuucacccagcuuucug

SEQ ID NO: 2576796 - RNA, 19 nt, Artificial Sequence
  Description of Artificial Sequence: Synthetic oligonucleotide
  Sense strand starting at position 3731 of SEQ ID NO: 1889062
gagagaaacugucucucac

SEQ ID NO: 2576797 - RNA, 19 nt, Artificial Sequence
  Description of Artificial Sequence: Synthetic oligonucleotide
  Antisense strand to SEQ ID NO: 2576796
gugagagacaguuucucuc

SEQ ID NO: 2576798 - RNA, 19 nt, Artificial Sequence
  Description of Artificial Sequence: Synthetic oligonucleotide
  Sense strand starting at position 3824 of SEQ ID NO: 1889062
augcuuauuucuuuaguca

SEQ ID NO: 2576799 - RNA, 19 nt, Artificial Sequence
  Description of Artificial Sequence: Synthetic oligonucleotide
  Antisense strand to SEQ ID NO: 2576798
ugacuaaagaaauaagcau

SEQ ID NO: 2576800 - RNA, 19 nt, Artificial Sequence
  Description of Artificial Sequence: Synthetic oligonucleotide
  Sense strand starting at position 3831 of SEQ ID NO: 1889062
uuucuuuagucacuuagga

SEQ ID NO: 2576801 - RNA, 19 nt, Artificial Sequence
  Description of Artificial Sequence: Synthetic oligonucleotide
  Antisense strand to SEQ ID NO: 2576800
uccuaagugacuaaagaaa

SEQ ID NO: 2576802 - RNA, 19 nt, Artificial Sequence
  Description of Artificial Sequence: Synthetic oligonucleotide
  Sense strand starting at position 3854 of SEQ ID NO: 1889062
acaagagauuugggaguua

SEQ ID NO: 2576803 - RNA, 19 nt, Artificial Sequence
  Description of Artificial Sequence: Synthetic oligonucleotide
  Antisense strand to SEQ ID NO: 2576802
uaacucccaaaucucuugu

SEQ ID NO: 2576804 - RNA, 19 nt, Artificial Sequence
  Description of Artificial Sequence: Synthetic oligonucleotide
  Sense strand starting at position 3932 of SEQ ID NO: 1889062
auugacacuuggguaaaua

SEQ ID NO: 2576805 - RNA, 19 nt, Artificial Sequence
  Description of Artificial Sequence: Synthetic oligonucleotide
  Antisense strand to SEQ ID NO: 2576804
uauuuacccaagugucaau

SEQ ID NO: 2576806 - RNA, 19 nt, Artificial Sequence
  Description of Artificial Sequence: Synthetic oligonucleotide
  Sense strand starting at position 32 of SEQ ID NO: 1889063
uccacagcucuugguacau

SEQ ID NO: 2576807 - RNA, 19 nt, Artificial Sequence
  Description of Artificial Sequence: Synthetic oligonucleotide
  Antisense strand to SEQ ID NO: 2576806
auguaccaagagcugugga

SEQ ID NO: 2576808 - RNA, 19 nt, Artificial Sequence
  Description of Artificial Sequence: Synthetic oligonucleotide
  Sense strand starting at position 58 of SEQ ID NO: 1889063
ucggucagugcagaauaaa

SEQ ID NO: 2576809 - RNA, 19 nt, Artificial Sequence
  Description of Artificial Sequence: Synthetic oligonucleotide
  Antisense strand to SEQ ID NO: 2576808
uuuauucugcacugaccga

SEQ ID NO: 2576810 - RNA, 19 nt, Artificial Sequence
  Description of Artificial Sequence: Synthetic oligonucleotide
  Sense strand starting at position 61 of SEQ ID NO: 1889063
gucagugcagaauaaacau

SEQ ID NO: 2576811 - RNA, 19 nt, Artificial Sequence
  Description of Artificial Sequence: Synthetic oligonucleotide
  Antisense strand to SEQ ID NO: 2576810
auguuuauucugcacugac

SEQ ID NO: 2576812 - RNA, 19 nt, Artificial Sequence
  Description of Artificial Sequence: Synthetic oligonucleotide
  Sense strand starting at position 81 of SEQ ID NO: 1889063
uguugagugaauggugaca

SEQ ID NO: 2576813 - RNA, 19 nt, Artificial Sequence
  Description of Artificial Sequence: Synthetic oligonucleotide
  Antisense strand to SEQ ID NO: 2576812
ugucaccauucacucaaca

SEQ ID NO: 2576814 - RNA, 19 nt, Artificial Sequence
  Description of Artificial Sequence: Synthetic oligonucleotide
  Sense strand starting at position 83 of SEQ ID NO: 1889063
uugagugaauggugacaga

SEQ ID NO: 2576815 - RNA, 19 nt, Artificial Sequence
  Description of Artificial Sequence: Synthetic oligonucleotide
  Antisense strand to SEQ ID NO: 2576814
ucugucaccauucacucaa

SEQ ID NO: 2576816 - RNA, 19 nt, Artificial Sequence
  Description of Artificial Sequence: Synthetic oligonucleotide
  Sense strand starting at position 161 of SEQ ID NO: 1889063
gcaggaaguugaucacuaa

SEQ ID NO: 2576817 - RNA, 19 nt, Artificial Sequence
  Description of Artificial Sequence: Synthetic oligonucleotide
  Antisense strand to SEQ ID NO: 2576816
uuagugaucaacuuccugc

SEQ ID NO: 2576818 - RNA, 19 nt, Artificial Sequence
  Description of Artificial Sequence: Synthetic oligonucleotide
  Sense strand starting at position 164 of SEQ ID NO: 1889063
ggaaguugaucacuaaguc

SEQ ID NO: 2576819 - RNA, 19 nt, Artificial Sequence
  Description of Artificial Sequence: Synthetic oligonucleotide
  Antisense strand to SEQ ID NO: 2576818
gacuuagugaucaacuucc

SEQ ID NO: 2576820 - RNA, 19 nt, Artificial Sequence
  Description of Artificial Sequence: Synthetic oligonucleotide
  Sense strand starting at position 168 of SEQ ID NO: 1889063
guugaucacuaagucaaca

SEQ ID NO: 2576821 - RNA, 19 nt, Artificial Sequence
  Description of Artificial Sequence: Synthetic oligonucleotide
  Antisense strand to SEQ ID NO: 2576820
uguugacuuagugaucaac

SEQ ID NO: 2576822 - RNA, 19 nt, Artificial Sequence
  Description of Artificial Sequence: Synthetic oligonucleotide
  Sense strand starting at position 184 of SEQ ID NO: 1889063
acaaguuaccauggcuaau

SEQ ID NO: 2576823 - RNA, 19 nt, Artificial Sequence
  Description of Artificial Sequence: Synthetic oligonucleotide
  Antisense strand to SEQ ID NO: 2576822
auuagccaugguaacuugu

SEQ ID NO: 2576824 - RNA, 19 nt, Artificial Sequence
  Description of Artificial Sequence: Synthetic oligonucleotide
  Sense strand starting at position 230 of SEQ ID NO: 1889063
cagagaucuuuaggucuuu

SEQ ID NO: 2576825 - RNA, 19 nt, Artificial Sequence
  Description of Artificial Sequence: Synthetic oligonucleotide
  Antisense strand to SEQ ID NO: 2576824
aaagaccuaaagaucucug

SEQ ID NO: 2576826 - RNA, 19 nt, Artificial Sequence
  Description of Artificial Sequence: Synthetic oligonucleotide
  Sense strand starting at position 332 of SEQ ID NO: 1889063
gcaggauuccuucagugag

SEQ ID NO: 2576827 - RNA, 19 nt, Artificial Sequence
  Description of Artificial Sequence: Synthetic oligonucleotide
  Antisense strand to SEQ ID NO: 2576826
cucacugaaggaauccugc

SEQ ID NO: 2576828 - RNA, 19 nt, Artificial Sequence
  Description of Artificial Sequence: Synthetic oligonucleotide
  Sense strand starting at position 335 of SEQ ID NO: 1889063
ggauuccuucagugagugu

SEQ ID NO: 2576829 - RNA, 19 nt, Artificial Sequence
  Description of Artificial Sequence: Synthetic oligonucleotide
  Antisense strand to SEQ ID NO: 2576828
acacucacugaaggaaucc

SEQ ID NO: 2576830 - RNA, 19 nt, Artificial Sequence
  Description of Artificial Sequence: Synthetic oligonucleotide
  Sense strand starting at position 348 of SEQ ID NO: 1889063
gagugugcuaguugcaguu

SEQ ID NO: 2576831 - RNA, 19 nt, Artificial Sequence
  Description of Artificial Sequence: Synthetic oligonucleotide
  Antisense strand to SEQ ID NO: 2576830
aacugcaacuagcacacuc

SEQ ID NO: 2576832 - RNA, 19 nt, Artificial Sequence
  Description of Artificial Sequence: Synthetic oligonucleotide
  Sense strand starting at position 606 of SEQ ID NO: 1889063
agugcugagcaaggagaau

SEQ ID NO: 2576833 - RNA, 19 nt, Artificial Sequence
  Description of Artificial Sequence: Synthetic oligonucleotide
  Antisense strand to SEQ ID NO: 2576832
auucuccuugcucagcacu

SEQ ID NO: 2576834 - RNA, 19 nt, Artificial Sequence
  Description of Artificial Sequence: Synthetic oligonucleotide
  Sense strand starting at position 712 of SEQ ID NO: 1889063
ggacuagacucuuccuaga

SEQ ID NO: 2576835 - RNA, 19 nt, Artificial Sequence
  Description of Artificial Sequence: Synthetic oligonucleotide
  Antisense strand to SEQ ID NO: 2576834
ucuaggaagagucuagucc

SEQ ID NO: 2576836 - RNA, 19 nt, Artificial Sequence
  Description of Artificial Sequence: Synthetic oligonucleotide
  Sense strand starting at position 1018 of SEQ ID NO: 1889063
gcuuaagggucuugggagu

SEQ ID NO: 2576837 - RNA, 19 nt, Artificial Sequence
  Description of Artificial Sequence: Synthetic oligonucleotide
  Antisense strand to SEQ ID NO: 2576836
acucccaagacccuuaagc

SEQ ID NO: 2576838 - RNA, 19 nt, Artificial Sequence
  Description of Artificial Sequence: Synthetic oligonucleotide
  Sense strand starting at position 1031 of SEQ ID NO: 1889063
gggaguguguccuguaguu

SEQ ID NO: 2576839 - RNA, 19 nt, Artificial Sequence
  Description of Artificial Sequence: Synthetic oligonucleotide
  Antisense strand to SEQ ID NO: 2576838
aacuacaggacacacuccc

SEQ ID NO: 2576840 - RNA, 19 nt, Artificial Sequence
  Description of Artificial Sequence: Synthetic oligonucleotide
  Sense strand starting at position 1033 of SEQ ID NO: 1889063
gaguguguccuguaguuua

SEQ ID NO: 2576841 - RNA, 19 nt, Artificial Sequence
  Description of Artificial Sequence: Synthetic oligonucleotide
  Antisense strand to SEQ ID NO: 2576840
uaaacuacaggacacacuc

SEQ ID NO: 2576842 - RNA, 19 nt, Artificial Sequence
  Description of Artificial Sequence: Synthetic oligonucleotide
  Sense strand starting at position 1440 of SEQ ID NO: 1889063
ccgaaaugauggccuguca

SEQ ID NO: 2576843 - RNA, 19 nt, Artificial Sequence
  Description of Artificial Sequence: Synthetic oligonucleotide
  Antisense strand to SEQ ID NO: 2576842
ugacaggccaucauuucgg

SEQ ID NO: 2576844 - RNA, 19 nt, Artificial Sequence
  Description of Artificial Sequence: Synthetic oligonucleotide
  Sense strand starting at position 1705 of SEQ ID NO: 1889063
augaauuagagcuguguuu

SEQ ID NO: 2576845 - RNA, 19 nt, Artificial Sequence
  Description of Artificial Sequence: Synthetic oligonucleotide
  Antisense strand to SEQ ID NO: 2576844
aaacacagcucuaauucau

SEQ ID NO: 2576846 - RNA, 19 nt, Artificial Sequence
  Description of Artificial Sequence: Synthetic oligonucleotide
  Sense strand starting at position 1712 of SEQ ID NO: 1889063
agagcuguguuucccaaac

SEQ ID NO: 2576847 - RNA, 19 nt, Artificial Sequence
  Description of Artificial Sequence: Synthetic oligonucleotide
  Antisense strand to SEQ ID NO: 2576846
guuugggaaacacagcucu

SEQ ID NO: 2576848 - RNA, 19 nt, Artificial Sequence
  Description of Artificial Sequence: Synthetic oligonucleotide
  Sense strand starting at position 1757 of SEQ ID NO: 1889063
gcccuaguuagagauacag

SEQ ID NO: 2576849 - RNA, 19 nt, Artificial Sequence
  Description of Artificial Sequence: Synthetic oligonucleotide
  Antisense strand to SEQ ID NO: 2576848
cuguaucucuaacuagggc

SEQ ID NO: 2576850 - RNA, 19 nt, Artificial Sequence
  Description of Artificial Sequence: Synthetic oligonucleotide
  Sense strand starting at position 1783 of SEQ ID NO: 1889063
aguaccucccuucgagauu

SEQ ID NO: 2576851 - RNA, 19 nt, Artificial Sequence
  Description of Artificial Sequence: Synthetic oligonucleotide
  Antisense strand to SEQ ID NO: 2576850
aaucucgaagggagguacu

SEQ ID NO: 2576852 - RNA, 19 nt, Artificial Sequence
  Description of Artificial Sequence: Synthetic oligonucleotide
  Sense strand starting at position 1857 of SEQ ID NO: 1889063
ccacgugauucucgugaac

SEQ ID NO: 2576853 - RNA, 19 nt, Artificial Sequence
  Description of Artificial Sequence: Synthetic oligonucleotide
  Antisense strand to SEQ ID NO: 2576852
guucacgagaaucacgugg

SEQ ID NO: 2576854 - RNA, 19 nt, Artificial Sequence
  Description of Artificial Sequence: Synthetic oligonucleotide
  Sense strand starting at position 1859 of SEQ ID NO: 1889063
acgugauucucgugaacaa

SEQ ID NO: 2576855 - RNA, 19 nt, Artificial Sequence
  Description of Artificial Sequence: Synthetic oligonucleotide
  Antisense strand to SEQ ID NO: 2576854
uuguucacgagaaucacgu

SEQ ID NO: 2576856 - RNA, 19 nt, Artificial Sequence
  Description of Artificial Sequence: Synthetic oligonucleotide
  Sense strand starting at position 1860 of SEQ ID NO: 1889063
cgugauucucgugaacaag

SEQ ID NO: 2576857 - RNA, 19 nt, Artificial Sequence
  Description of Artificial Sequence: Synthetic oligonucleotide
  Antisense strand to SEQ ID NO: 2576856
cuuguucacgagaaucacg

SEQ ID NO: 2576858 - RNA, 19 nt, Artificial Sequence
  Description of Artificial Sequence: Synthetic oligonucleotide
  Sense strand starting at position 1863 of SEQ ID NO: 1889063
gauucucgugaacaagcaa

SEQ ID NO: 2576859 - RNA, 19 nt, Artificial Sequence
  Description of Artificial Sequence: Synthetic oligonucleotide
  Antisense strand to SEQ ID NO: 2576858
uugcuuguucacgagaauc

SEQ ID NO: 2576860 - RNA, 19 nt, Artificial Sequence
  Description of Artificial Sequence: Synthetic oligonucleotide
  Sense strand starting at position 16 of SEQ ID NO: 1889064
agcucuuacgaucaaugaa

SEQ ID NO: 2576861 - RNA, 19 nt, Artificial Sequence
  Description of Artificial Sequence: Synthetic oligonucleotide
  Antisense strand to SEQ ID NO: 2576860
uucauugaucguaagagcu

SEQ ID NO: 2576862 - RNA, 19 nt, Artificial Sequence
  Description of Artificial Sequence: Synthetic oligonucleotide
  Sense strand starting at position 19 of SEQ ID NO: 1889064
ucuuacgaucaaugaacuu

SEQ ID NO: 2576863 - RNA, 19 nt, Artificial Sequence
  Description of Artificial Sequence: Synthetic oligonucleotide
  Antisense strand to SEQ ID NO: 2576862
aaguucauugaucguaaga

SEQ ID NO: 2576864 - RNA, 19 nt, Artificial Sequence
  Description of Artificial Sequence: Synthetic oligonucleotide
  Sense strand starting at position 86 of SEQ ID NO: 1889064
cacauagaugcgugaagua

SEQ ID NO: 2576865 - RNA, 19 nt, Artificial Sequence
  Description of Artificial Sequence: Synthetic oligonucleotide
  Antisense strand to SEQ ID NO: 2576864
uacuucacgcaucuaugug

SEQ ID NO: 2576866 - RNA, 19 nt, Artificial Sequence
  Description of Artificial Sequence: Synthetic oligonucleotide
  Sense strand starting at position 100 of SEQ ID NO: 1889064
aaguaucugggcugaggaa

SEQ ID NO: 2576867 - RNA, 19 nt, Artificial Sequence
  Description of Artificial Sequence: Synthetic oligonucleotide
  Antisense strand to SEQ ID NO: 2576866
uuccucagcccagauacuu

SEQ ID NO: 2576868 - RNA, 19 nt, Artificial Sequence
  Description of Artificial Sequence: Synthetic oligonucleotide
  Sense strand starting at position 148 of SEQ ID NO: 1889064
cuuaucacuguuuagcaua

SEQ ID NO: 2576869 - RNA, 19 nt, Artificial Sequence
  Description of Artificial Sequence: Synthetic oligonucleotide
  Antisense strand to SEQ ID NO: 2576868
uaugcuaaacagugauaag

SEQ ID NO: 2576870 - RNA, 19 nt, Artificial Sequence
  Description of Artificial Sequence: Synthetic oligonucleotide
  Sense strand starting at position 295 of SEQ ID NO: 1889064
gugccugguacauagaaga

SEQ ID NO: 2576871 - RNA, 19 nt, Artificial Sequence
  Description of Artificial Sequence: Synthetic oligonucleotide
  Antisense strand to SEQ ID NO: 2576870
ucuucuauguaccaggcac

SEQ ID NO: 2576872 - RNA, 19 nt, Artificial Sequence
  Description of Artificial Sequence: Synthetic oligonucleotide
  Sense strand starting at position 325 of SEQ ID NO: 1889064
auauaaguugcaugaggga

SEQ ID NO: 2576873 - RNA, 19 nt, Artificial Sequence
  Description of Artificial Sequence: Synthetic oligonucleotide
  Antisense strand to SEQ ID NO: 2576872
ucccucaugcaacuuauau

SEQ ID NO: 2576874 - RNA, 19 nt, Artificial Sequence
  Description of Artificial Sequence: Synthetic oligonucleotide
  Sense strand starting at position 397 of SEQ ID NO: 1889064
ugugucaacgaagaaguua

SEQ ID NO: 2576875 - RNA, 19 nt, Artificial Sequence
  Description of Artificial Sequence: Synthetic oligonucleotide
  Antisense strand to SEQ ID NO: 2576874
uaacuucuucguugacaca

SEQ ID NO: 2576876 - RNA, 19 nt, Artificial Sequence
  Description of Artificial Sequence: Synthetic oligonucleotide
  Sense strand starting at position 528 of SEQ ID NO: 1889064
uggagucucucuucccauu

SEQ ID NO: 2576877 - RNA, 19 nt, Artificial Sequence
  Description of Artificial Sequence: Synthetic oligonucleotide
  Antisense strand to SEQ ID NO: 2576876
aaugggaagagagacucca

SEQ ID NO: 2576878 - RNA, 19 nt, Artificial Sequence
  Description of Artificial Sequence: Synthetic oligonucleotide
  Sense strand starting at position 604 of SEQ ID NO: 1889064
ggagucgcucaaugacauu

SEQ ID NO: 2576879 - RNA, 19 nt, Artificial Sequence
  Description of Artificial Sequence: Synthetic oligonucleotide
  Antisense strand to SEQ ID NO: 2576878
aaugucauugagcgacucc

SEQ ID NO: 2576880 - RNA, 19 nt, Artificial Sequence
  Description of Artificial Sequence: Synthetic oligonucleotide
  Sense strand starting at position 651 of SEQ ID NO: 1889064
ucauauaccuugucucgau

SEQ ID NO: 2576881 - RNA, 19 nt, Artificial Sequence
  Description of Artificial Sequence: Synthetic oligonucleotide
  Antisense strand to SEQ ID NO: 2576880
aucgagacaagguauauga

SEQ ID NO: 2576882 - RNA, 19 nt, Artificial Sequence
  Description of Artificial Sequence: Synthetic oligonucleotide
  Sense strand starting at position 678 of SEQ ID NO: 1889064
accuuucugaugggacgaa

SEQ ID NO: 2576883 - RNA, 19 nt, Artificial Sequence
  Description of Artificial Sequence: Synthetic oligonucleotide
  Antisense strand to SEQ ID NO: 2576882
uucgucccaucagaaaggu

SEQ ID NO: 2576884 - RNA, 19 nt, Artificial Sequence
  Description of Artificial Sequence: Synthetic oligonucleotide
  Sense strand starting at position 848 of SEQ ID NO: 1889064
ggcucuauccuuuauagau

SEQ ID NO: 2576885 - RNA, 19 nt, Artificial Sequence
  Description of Artificial Sequence: Synthetic oligonucleotide
  Antisense strand to SEQ ID NO: 2576884
aucuauaaaggauagagcc

SEQ ID NO: 2576886 - RNA, 19 nt, Artificial Sequence
  Description of Artificial Sequence: Synthetic oligonucleotide
  Sense strand starting at position 857 of SEQ ID NO: 1889064
cuuuauagaugugugacuu

SEQ ID NO: 2576887 - RNA, 19 nt, Artificial Sequence
  Description of Artificial Sequence: Synthetic oligonucleotide
  Antisense strand to SEQ ID NO: 2576886
aagucacacaucuauaaag

SEQ ID NO: 2576888 - RNA, 19 nt, Artificial Sequence
  Description of Artificial Sequence: Synthetic oligonucleotide
  Sense strand starting at position 858 of SEQ ID NO: 1889064
uuuauagaugugugacuuu

SEQ ID NO: 2576889 - RNA, 19 nt, Artificial Sequence
  Description of Artificial Sequence: Synthetic oligonucleotide
  Antisense strand to SEQ ID NO: 2576888
aaagucacacaucuauaaa

SEQ ID NO: 2576890 - RNA, 19 nt, Artificial Sequence
  Description of Artificial Sequence: Synthetic oligonucleotide
  Sense strand starting at position 928 of SEQ ID NO: 1889064
augacaguauuaccuugua

SEQ ID NO: 2576891 - RNA, 19 nt, Artificial Sequence
  Description of Artificial Sequence: Synthetic oligonucleotide
  Antisense strand to SEQ ID NO: 2576890
uacaagguaauacugucau

SEQ ID NO: 2576892 - RNA, 19 nt, Artificial Sequence
  Description of Artificial Sequence: Synthetic oligonucleotide
  Sense strand starting at position 931 of SEQ ID NO: 1889064
acaguauuaccuuguagag

SEQ ID NO: 2576893 - RNA, 19 nt, Artificial Sequence
  Description of Artificial Sequence: Synthetic oligonucleotide
  Antisense strand to SEQ ID NO: 2576892
cucuacaagguaauacugu

SEQ ID NO: 2576894 - RNA, 19 nt, Artificial Sequence
  Description of Artificial Sequence: Synthetic oligonucleotide
  Sense strand starting at position 941 of SEQ ID NO: 1889064
cuuguagagucauuaggau

SEQ ID NO: 2576895 - RNA, 19 nt, Artificial Sequence
  Description of Artificial Sequence: Synthetic oligonucleotide
  Antisense strand to SEQ ID NO: 2576894
auccuaaugacucuacaag

SEQ ID NO: 2576896 - RNA, 19 nt, Artificial Sequence
  Description of Artificial Sequence: Synthetic oligonucleotide
  Sense strand starting at position 955 of SEQ ID NO: 1889064
aggauuaaaugagcguuua

SEQ ID NO: 2576897 - RNA, 19 nt, Artificial Sequence
  Description of Artificial Sequence: Synthetic oligonucleotide
  Antisense strand to SEQ ID NO: 2576896
uaaacgcucauuuaauccu

SEQ ID NO: 2576898 - RNA, 19 nt, Artificial Sequence
  Description of Artificial Sequence: Synthetic oligonucleotide
  Sense strand starting at position 956 of SEQ ID NO: 1889064
ggauuaaaugagcguuuac

SEQ ID NO: 2576899 - RNA, 19 nt, Artificial Sequence
  Description of Artificial Sequence: Synthetic oligonucleotide
  Antisense strand to SEQ ID NO: 2576898
guaaacgcucauuuaaucc

SEQ ID NO: 2576900 - RNA, 19 nt, Artificial Sequence
  Description of Artificial Sequence: Synthetic oligonucleotide
  Sense strand starting at position 965 of SEQ ID NO: 1889064
gagcguuuacuacaaagca

SEQ ID NO: 2576901 - RNA, 19 nt, Artificial Sequence
  Description of Artificial Sequence: Synthetic oligonucleotide
  Antisense strand to SEQ ID NO: 2576900
ugcuuuguaguaaacgcuc

SEQ ID NO: 2576902 - RNA, 19 nt, Artificial Sequence
  Description of Artificial Sequence: Synthetic oligonucleotide
  Sense strand starting at position 1571 of SEQ ID NO: 1889064
aaggguuggcccuaacuuu

SEQ ID NO: 2576903 - RNA, 19 nt, Artificial Sequence
  Description of Artificial Sequence: Synthetic oligonucleotide
  Antisense strand to SEQ ID NO: 2576902
aaaguuagggccaacccuu

SEQ ID NO: 2576904 - RNA, 19 nt, Artificial Sequence
  Description of Artificial Sequence: Synthetic oligonucleotide
  Sense strand starting at position 2239 of SEQ ID NO: 1889064
ugggauuuggcggguucua

SEQ ID NO: 2576905 - RNA, 19 nt, Artificial Sequence
  Description of Artificial Sequence: Synthetic oligonucleotide
  Antisense strand to SEQ ID NO: 2576904
uagaacccgccaaauccca

SEQ ID NO: 2576906 - RNA, 19 nt, Artificial Sequence
  Description of Artificial Sequence: Synthetic oligonucleotide
  Sense strand starting at position 2333 of SEQ ID NO: 1889064
gguucuggucuauaaggaa

SEQ ID NO: 2576907 - RNA, 19 nt, Artificial Sequence
  Description of Artificial Sequence: Synthetic oligonucleotide
  Antisense strand to SEQ ID NO: 2576906
uuccuuauagaccagaacc

SEQ ID NO: 2576908 - RNA, 19 nt, Artificial Sequence
  Description of Artificial Sequence: Synthetic oligonucleotide
  Sense strand starting at position 2349 of SEQ ID NO: 1889064
gaagaucccgugugaucug

SEQ ID NO: 2576909 - RNA, 19 nt, Artificial Sequence
  Description of Artificial Sequence: Synthetic oligonucleotide
  Antisense strand to SEQ ID NO: 2576908
cagaucacacgggaucuuc

SEQ ID NO: 2576910 - RNA, 19 nt, Artificial Sequence
  Description of Artificial Sequence: Synthetic oligonucleotide
  Sense strand starting at position 2415 of SEQ ID NO: 1889064
uggcaaugggacugaguau

SEQ ID NO: 2576911 - RNA, 19 nt, Artificial Sequence
  Description of Artificial Sequence: Synthetic oligonucleotide
  Antisense strand to SEQ ID NO: 2576910
auacucagucccauugcca

SEQ ID NO: 2576912 - RNA, 19 nt, Artificial Sequence
  Description of Artificial Sequence: Synthetic oligonucleotide
  Sense strand starting at position 2517 of SEQ ID NO: 1889064
ugaggcucaaguggaaauu

SEQ ID NO: 2576913 - RNA, 19 nt, Artificial Sequence
  Description of Artificial Sequence: Synthetic oligonucleotide
  Antisense strand to SEQ ID NO: 2576912
aauuuccacuugagccuca

SEQ ID NO: 2576914 - RNA, 19 nt, Artificial Sequence
  Description of Artificial Sequence: Synthetic oligonucleotide
  Sense strand starting at position 2551 of SEQ ID NO: 1889064
cuaaucaccucguuugaua

SEQ ID NO: 2576915 - RNA, 19 nt, Artificial Sequence
  Description of Artificial Sequence: Synthetic oligonucleotide
  Antisense strand to SEQ ID NO: 2576914
uaucaaacgaggugauuag

SEQ ID NO: 2576916 - RNA, 19 nt, Artificial Sequence
  Description of Artificial Sequence: Synthetic oligonucleotide
  Sense strand starting at position 2559 of SEQ ID NO: 1889064
cucguuugauagucaaaug

SEQ ID NO: 2576917 - RNA, 19 nt, Artificial Sequence
  Description of Artificial Sequence: Synthetic oligonucleotide
  Antisense strand to SEQ ID NO: 2576916
cauuugacuaucaaacgag

SEQ ID NO: 2576918 - RNA, 19 nt, Artificial Sequence
  Description of Artificial Sequence: Synthetic oligonucleotide
  Sense strand starting at position 2591 of SEQ ID NO: 1889064
aaguccucugccgaagauu

SEQ ID NO: 2576919 - RNA, 19 nt, Artificial Sequence
  Description of Artificial Sequence: Synthetic oligonucleotide
  Antisense strand to SEQ ID NO: 2576918
aaucuucggcagaggacuu

SEQ ID NO: 2576920 - RNA, 19 nt, Artificial Sequence
  Description of Artificial Sequence: Synthetic oligonucleotide
  Sense strand starting at position 2686 of SEQ ID NO: 1889064
uagagugacugagugaauu

SEQ ID NO: 2576921 - RNA, 19 nt, Artificial Sequence
  Description of Artificial Sequence: Synthetic oligonucleotide
  Antisense strand to SEQ ID NO: 2576920
aauucacucagucacucua

SEQ ID NO: 2576922 - RNA, 19 nt, Artificial Sequence
  Description of Artificial Sequence: Synthetic oligonucleotide
  Sense strand starting at position 3307 of SEQ ID NO: 1889064
uugcccuuagaacgagaua

SEQ ID NO: 2576923 - RNA, 19 nt, Artificial Sequence
  Description of Artificial Sequence: Synthetic oligonucleotide
  Antisense strand to SEQ ID NO: 2576922
uaucucguucuaagggcaa

SEQ ID NO: 2576924 - RNA, 19 nt, Artificial Sequence
  Description of Artificial Sequence: Synthetic oligonucleotide
  Sense strand starting at position 3390 of SEQ ID NO: 1889064
aaauuacauugagugugau

SEQ ID NO: 2576925 - RNA, 19 nt, Artificial Sequence
  Description of Artificial Sequence: Synthetic oligonucleotide
  Antisense strand to SEQ ID NO: 2576924
aucacacucaauguaauuu

SEQ ID NO: 2576926 - RNA, 19 nt, Artificial Sequence
  Description of Artificial Sequence: Synthetic oligonucleotide
  Sense strand starting at position 3391 of SEQ ID NO: 1889064
aauuacauugagugugauu

SEQ ID NO: 2576927 - RNA, 19 nt, Artificial Sequence
  Description of Artificial Sequence: Synthetic oligonucleotide
  Antisense strand to SEQ ID NO: 2576926
aaucacacucaauguaauu

SEQ ID NO: 2576928 - RNA, 19 nt, Artificial Sequence
  Description of Artificial Sequence: Synthetic oligonucleotide
  Sense strand starting at position 3396 of SEQ ID NO: 1889064
cauugagugugauuggaau

SEQ ID NO: 2576929 - RNA, 19 nt, Artificial Sequence
  Description of Artificial Sequence: Synthetic oligonucleotide
  Antisense strand to SEQ ID NO: 2576928
auuccaaucacacucaaug

SEQ ID NO: 2576930 - RNA, 19 nt, Artificial Sequence
  Description of Artificial Sequence: Synthetic oligonucleotide
  Sense strand starting at position 3398 of SEQ ID NO: 1889064
uugagugugauuggaauag

SEQ ID NO: 2576931 - RNA, 19 nt, Artificial Sequence
  Description of Artificial Sequence: Synthetic oligonucleotide
  Antisense strand to SEQ ID NO: 2576930
cuauuccaaucacacucaa

SEQ ID NO: 2576932 - RNA, 19 nt, Artificial Sequence
  Description of Artificial Sequence: Synthetic oligonucleotide
  Sense strand starting at position 3522 of SEQ ID NO: 1889064
uggagaugagucuguguaa

SEQ ID NO: 2576933 - RNA, 19 nt, Artificial Sequence
  Description of Artificial Sequence: Synthetic oligonucleotide
  Antisense strand to SEQ ID NO: 2576932
uuacacagacucaucucca

SEQ ID NO: 2576934 - RNA, 19 nt, Artificial Sequence
  Description of Artificial Sequence: Synthetic oligonucleotide
  Sense strand starting at position 3523 of SEQ ID NO: 1889064
ggagaugagucuguguaag

SEQ ID NO: 2576935 - RNA, 19 nt, Artificial Sequence
  Description of Artificial Sequence: Synthetic oligonucleotide
  Antisense strand to SEQ ID NO: 2576934
cuuacacagacucaucucc

SEQ ID NO: 2576936 - RNA, 19 nt, Artificial Sequence
  Description of Artificial Sequence: Synthetic oligonucleotide
  Sense strand starting at position 3658 of SEQ ID NO: 1889064
uuaaguucgccaguuguuu

SEQ ID NO: 2576937 - RNA, 19 nt, Artificial Sequence
  Description of Artificial Sequence: Synthetic oligonucleotide
  Antisense strand to SEQ ID NO: 2576936
aaacaacuggcgaacuuaa

SEQ ID NO: 2576938 - RNA, 19 nt, Artificial Sequence
  Description of Artificial Sequence: Synthetic oligonucleotide
  Sense strand starting at position 3795 of SEQ ID NO: 1889064
cgccuaagccuccugcaua

SEQ ID NO: 2576939 - RNA, 19 nt, Artificial Sequence
  Description of Artificial Sequence: Synthetic oligonucleotide
  Antisense strand to SEQ ID NO: 2576938
uaugcaggaggcuuaggcg

SEQ ID NO: 2576940 - RNA, 19 nt, Artificial Sequence
  Description of Artificial Sequence: Synthetic oligonucleotide
  Sense strand starting at position 277 of SEQ ID NO: 1889065
acaugagauuuacagacca

SEQ ID NO: 2576941 - RNA, 19 nt, Artificial Sequence
  Description of Artificial Sequence: Synthetic oligonucleotide
  Antisense strand to SEQ ID NO: 2576940
uggucuguaaaucucaugu

SEQ ID NO: 2576942 - RNA, 19 nt, Artificial Sequence
  Description of Artificial Sequence: Synthetic oligonucleotide
  Sense strand starting at position 324 of SEQ ID NO: 1889065
acaauuaucucguucuaag

SEQ ID NO: 2576943 - RNA, 19 nt, Artificial Sequence
  Description of Artificial Sequence: Synthetic oligonucleotide
  Antisense strand to SEQ ID NO: 2576942
cuuagaacgagauaauugu

SEQ ID NO: 2576944 - RNA, 19 nt, Artificial Sequence
  Description of Artificial Sequence: Synthetic oligonucleotide
  Sense strand starting at position 626 of SEQ ID NO: 1889065
ggacacagacccugucuaa

SEQ ID NO: 2576945 - RNA, 19 nt, Artificial Sequence
  Description of Artificial Sequence: Synthetic oligonucleotide
  Antisense strand to SEQ ID NO: 2576944
uuagacagggucugugucc

SEQ ID NO: 2576946 - RNA, 19 nt, Artificial Sequence
  Description of Artificial Sequence: Synthetic oligonucleotide
  Sense strand starting at position 960 of SEQ ID NO: 1889065
gucacucuagugcauaaga

SEQ ID NO: 2576947 - RNA, 19 nt, Artificial Sequence
  Description of Artificial Sequence: Synthetic oligonucleotide
  Antisense strand to SEQ ID NO: 2576946
ucuuaugcacuagagugac

SEQ ID NO: 2576948 - RNA, 19 nt, Artificial Sequence
  Description of Artificial Sequence: Synthetic oligonucleotide
  Sense strand starting at position 1016 of SEQ ID NO: 1889065
ugggaacuaugccuaacua

SEQ ID NO: 2576949 - RNA, 19 nt, Artificial Sequence
  Description of Artificial Sequence: Synthetic oligonucleotide
  Antisense strand to SEQ ID NO: 2576948
uaguuaggcauaguuccca

SEQ ID NO: 2576950 - RNA, 19 nt, Artificial Sequence
  Description of Artificial Sequence: Synthetic oligonucleotide
  Sense strand starting at position 1042 of SEQ ID NO: 1889065
gccaaucuucggcagagga

SEQ ID NO: 2576951 - RNA, 19 nt, Artificial Sequence
  Description of Artificial Sequence: Synthetic oligonucleotide
  Antisense strand to SEQ ID NO: 2576950
uccucugccgaagauuggc

SEQ ID NO: 2576952 - RNA, 19 nt, Artificial Sequence
  Description of Artificial Sequence: Synthetic oligonucleotide
  Sense strand starting at position 1044 of SEQ ID NO: 1889065
caaucuucggcagaggacu

SEQ ID NO: 2576953 - RNA, 19 nt, Artificial Sequence
  Description of Artificial Sequence: Synthetic oligonucleotide
  Antisense strand to SEQ ID NO: 2576952
aguccucugccgaagauug

SEQ ID NO: 2576954 - RNA, 19 nt, Artificial Sequence
  Description of Artificial Sequence: Synthetic oligonucleotide
  Sense strand starting at position 1076 of SEQ ID NO: 1889065
ccauuugacuaucaaacga

SEQ ID NO: 2576955 - RNA, 19 nt, Artificial Sequence
  Description of Artificial Sequence: Synthetic oligonucleotide
  Antisense strand to SEQ ID NO: 2576954
ucguuugauagucaaaugg

SEQ ID NO: 2576956 - RNA, 19 nt, Artificial Sequence
  Description of Artificial Sequence: Synthetic oligonucleotide
  Sense strand starting at position 1083 of SEQ ID NO: 1889065
acuaucaaacgaggugauu

SEQ ID NO: 2576957 - RNA, 19 nt, Artificial Sequence
  Description of Artificial Sequence: Synthetic oligonucleotide
  Antisense strand to SEQ ID NO: 2576956
aaucaccucguuugauagu

SEQ ID NO: 2576958 - RNA, 19 nt, Artificial Sequence
  Description of Artificial Sequence: Synthetic oligonucleotide
  Sense strand starting at position 1229 of SEQ ID NO: 1889065
ucccauugccaggagugaa

SEQ ID NO: 2576959 - RNA, 19 nt, Artificial Sequence
  Description of Artificial Sequence: Synthetic oligonucleotide
  Antisense strand to SEQ ID NO: 2576958
uucacuccuggcaauggga

SEQ ID NO: 2576960 - RNA, 19 nt, Artificial Sequence
  Description of Artificial Sequence: Synthetic oligonucleotide
  Sense strand starting at position 1286 of SEQ ID NO: 1889065
acagaucacacgggaucuu

SEQ ID NO: 2576961 - RNA, 19 nt, Artificial Sequence
  Description of Artificial Sequence: Synthetic oligonucleotide
  Antisense strand to SEQ ID NO: 2576960
aagaucccgugugaucugu

SEQ ID NO: 2576962 - RNA, 19 nt, Artificial Sequence
  Description of Artificial Sequence: Synthetic oligonucleotide
  Sense strand starting at position 1295 of SEQ ID NO: 1889065
acgggaucuuccuuauaga

SEQ ID NO: 2576963 - RNA, 19 nt, Artificial Sequence
  Description of Artificial Sequence: Synthetic oligonucleotide
  Antisense strand to SEQ ID NO: 2576962
ucuauaaggaagaucccgu

SEQ ID NO: 2576964 - RNA, 19 nt, Artificial Sequence
  Description of Artificial Sequence: Synthetic oligonucleotide
  Sense strand starting at position 1296 of SEQ ID NO: 1889065
cgggaucuuccuuauagac

SEQ ID NO: 2576965 - RNA, 19 nt, Artificial Sequence
  Description of Artificial Sequence: Synthetic oligonucleotide
  Antisense strand to SEQ ID NO: 2576964
gucuauaaggaagaucccg

SEQ ID NO: 2576966 - RNA, 19 nt, Artificial Sequence
  Description of Artificial Sequence: Synthetic oligonucleotide
  Sense strand starting at position 2072 of SEQ ID NO: 1889065
gggccaacccuuugaauug

SEQ ID NO: 2576967 - RNA, 19 nt, Artificial Sequence
  Description of Artificial Sequence: Synthetic oligonucleotide
  Antisense strand to SEQ ID NO: 2576966
caauucaaaggguuggccc

SEQ ID NO: 2576968 - RNA, 19 nt, Artificial Sequence
  Description of Artificial Sequence: Synthetic oligonucleotide
  Sense strand starting at position 2211 of SEQ ID NO: 1889065
gccuccgauguuuaacaga

SEQ ID NO: 2576969 - RNA, 19 nt, Artificial Sequence
  Description of Artificial Sequence: Synthetic oligonucleotide
  Antisense strand to SEQ ID NO: 2576968
ucuguuaaacaucggaggc

SEQ ID NO: 2576970 - RNA, 19 nt, Artificial Sequence
  Description of Artificial Sequence: Synthetic oligonucleotide
  Sense strand starting at position 2313 of SEQ ID NO: 1889065
cgccuuucugugcccuaua

SEQ ID NO: 2576971 - RNA, 19 nt, Artificial Sequence
  Description of Artificial Sequence: Synthetic oligonucleotide
  Antisense strand to SEQ ID NO: 2576970
uauagggcacagaaaggcg

SEQ ID NO: 2576972 - RNA, 19 nt, Artificial Sequence
  Description of Artificial Sequence: Synthetic oligonucleotide
  Sense strand starting at position 2415 of SEQ ID NO: 1889065
ucaagaauuuagcauggau

SEQ ID NO: 2576973 - RNA, 19 nt, Artificial Sequence
  Description of Artificial Sequence: Synthetic oligonucleotide
  Antisense strand to SEQ ID NO: 2576972
auccaugcuaaauucuuga

SEQ ID NO: 2576974 - RNA, 19 nt, Artificial Sequence
  Description of Artificial Sequence: Synthetic oligonucleotide
  Sense strand starting at position 2486 of SEQ ID NO: 1889065
uuguuaaucuaagcaggaa

SEQ ID NO: 2576975 - RNA, 19 nt, Artificial Sequence
  Description of Artificial Sequence: Synthetic oligonucleotide
  Antisense strand to SEQ ID NO: 2576974
uuccugcuuagauuaacaa

SEQ ID NO: 2576976 - RNA, 19 nt, Artificial Sequence
  Description of Artificial Sequence: Synthetic oligonucleotide
  Sense strand starting at position 2517 of SEQ ID NO: 1889065
gaacuaggccuaugagcau

SEQ ID NO: 2576977 - RNA, 19 nt, Artificial Sequence
  Description of Artificial Sequence: Synthetic oligonucleotide
  Antisense strand to SEQ ID NO: 2576976
augcucauaggccuaguuc

SEQ ID NO: 2576978 - RNA, 19 nt, Artificial Sequence
  Description of Artificial Sequence: Synthetic oligonucleotide
  Sense strand starting at position 2573 of SEQ ID NO: 1889065
ggacauuaugauuggaguu

SEQ ID NO: 2576979 - RNA, 19 nt, Artificial Sequence
  Description of Artificial Sequence: Synthetic oligonucleotide
  Antisense strand to SEQ ID NO: 2576978
aacuccaaucauaaugucc

SEQ ID NO: 2576980 - RNA, 19 nt, Artificial Sequence
  Description of Artificial Sequence: Synthetic oligonucleotide
  Sense strand starting at position 2636 of SEQ ID NO: 1889065
uagagaguuuaccauuuga

SEQ ID NO: 2576981 - RNA, 19 nt, Artificial Sequence
  Description of Artificial Sequence: Synthetic oligonucleotide
  Antisense strand to SEQ ID NO: 2576980
ucaaaugguaaacucucua

SEQ ID NO: 2576982 - RNA, 19 nt, Artificial Sequence
  Description of Artificial Sequence: Synthetic oligonucleotide
  Sense strand starting at position 2652 of SEQ ID NO: 1889065
ugauaagcauuauucuaga

SEQ ID NO: 2576983 - RNA, 19 nt, Artificial Sequence
  Description of Artificial Sequence: Synthetic oligonucleotide
  Antisense strand to SEQ ID NO: 2576982
ucuagaauaaugcuuauca

SEQ ID NO: 2576984 - RNA, 19 nt, Artificial Sequence
  Description of Artificial Sequence: Synthetic oligonucleotide
  Sense strand starting at position 2657 of SEQ ID NO: 1889065
agcauuauucuagaugcuu

SEQ ID NO: 2576985 - RNA, 19 nt, Artificial Sequence
  Description of Artificial Sequence: Synthetic oligonucleotide
  Antisense strand to SEQ ID NO: 2576984
aagcaucuagaauaaugcu

SEQ ID NO: 2576986 - RNA, 19 nt, Artificial Sequence
  Description of Artificial Sequence: Synthetic oligonucleotide
  Sense strand starting at position 2764 of SEQ ID NO: 1889065
guuauuuacuugccaaagu

SEQ ID NO: 2576987 - RNA, 19 nt, Artificial Sequence
  Description of Artificial Sequence: Synthetic oligonucleotide
  Antisense strand to SEQ ID NO: 2576986
acuuuggcaaguaaauaac

SEQ ID NO: 2576988 - RNA, 19 nt, Artificial Sequence
  Description of Artificial Sequence: Synthetic oligonucleotide
  Sense strand starting at position 2887 of SEQ ID NO: 1889065
gagagucucagagggucau

SEQ ID NO: 2576989 - RNA, 19 nt, Artificial Sequence
  Description of Artificial Sequence: Synthetic oligonucleotide
  Antisense strand to SEQ ID NO: 2576988
augacccucugagacucuc

SEQ ID NO: 2576990 - RNA, 19 nt, Artificial Sequence
  Description of Artificial Sequence: Synthetic oligonucleotide
  Sense strand starting at position 2891 of SEQ ID NO: 1889065
gucucagagggucaugaua

SEQ ID NO: 2576991 - RNA, 19 nt, Artificial Sequence
  Description of Artificial Sequence: Synthetic oligonucleotide
  Antisense strand to SEQ ID NO: 2576990
uaucaugacccucugagac

SEQ ID NO: 2576992 - RNA, 19 nt, Artificial Sequence
  Description of Artificial Sequence: Synthetic oligonucleotide
  Sense strand starting at position 2898 of SEQ ID NO: 1889065
agggucaugauaugaggua

SEQ ID NO: 2576993 - RNA, 19 nt, Artificial Sequence
  Description of Artificial Sequence: Synthetic oligonucleotide
  Antisense strand to SEQ ID NO: 2576992
uaccucauaucaugacccu

SEQ ID NO: 2576994 - RNA, 19 nt, Artificial Sequence
  Description of Artificial Sequence: Synthetic oligonucleotide
  Sense strand starting at position 2937 of SEQ ID NO: 1889065
ccuauuggucaccauugua

SEQ ID NO: 2576995 - RNA, 19 nt, Artificial Sequence
  Description of Artificial Sequence: Synthetic oligonucleotide
  Antisense strand to SEQ ID NO: 2576994
uacaauggugaccaauagg

SEQ ID NO: 2576996 - RNA, 19 nt, Artificial Sequence
  Description of Artificial Sequence: Synthetic oligonucleotide
  Sense strand starting at position 3028 of SEQ ID NO: 1889065
gagaaaugucauugagcga

SEQ ID NO: 2576997 - RNA, 19 nt, Artificial Sequence
  Description of Artificial Sequence: Synthetic oligonucleotide
  Antisense strand to SEQ ID NO: 2576996
ucgcucaaugacauuucuc

SEQ ID NO: 2576998 - RNA, 19 nt, Artificial Sequence
  Description of Artificial Sequence: Synthetic oligonucleotide
  Sense strand starting at position 3029 of SEQ ID NO: 1889065
agaaaugucauugagcgac

SEQ ID NO: 2576999 - RNA, 19 nt, Artificial Sequence
  Description of Artificial Sequence: Synthetic oligonucleotide
  Antisense strand to SEQ ID NO: 2576998
gucgcucaaugacauuucu

SEQ ID NO: 2577000 - RNA, 19 nt, Artificial Sequence
  Description of Artificial Sequence: Synthetic oligonucleotide
  Sense strand starting at position 3202 of SEQ ID NO: 1889065
agcacucggaguuauauau

SEQ ID NO: 2577001 - RNA, 19 nt, Artificial Sequence
  Description of Artificial Sequence: Synthetic oligonucleotide
  Antisense strand to SEQ ID NO: 2577000
auauauaacuccgagugcu

SEQ ID NO: 2577002 - RNA, 19 nt, Artificial Sequence
  Description of Artificial Sequence: Synthetic oligonucleotide
  Sense strand starting at position 3225 of SEQ ID NO: 1889065
guggauuugggcuguaacu

SEQ ID NO: 2577003 - RNA, 19 nt, Artificial Sequence
  Description of Artificial Sequence: Synthetic oligonucleotide
  Antisense strand to SEQ ID NO: 2577002
aguuacagcccaaauccac

SEQ ID NO: 2577004 - RNA, 19 nt, Artificial Sequence
  Description of Artificial Sequence: Synthetic oligonucleotide
  Sense strand starting at position 3488 of SEQ ID NO: 1889065
uaugcuaaacagugauaag

SEQ ID NO: 2577005 - RNA, 19 nt, Artificial Sequence
  Description of Artificial Sequence: Synthetic oligonucleotide
  Antisense strand to SEQ ID NO: 2577004
cuuaucacuguuuagcaua

SEQ ID NO: 2577006 - RNA, 19 nt, Artificial Sequence
  Description of Artificial Sequence: Synthetic oligonucleotide
  Sense strand starting at position 3591 of SEQ ID NO: 1889065
uggaguugacacuggcaga

SEQ ID NO: 2577007 - RNA, 19 nt, Artificial Sequence
  Description of Artificial Sequence: Synthetic oligonucleotide
  Antisense strand to SEQ ID NO: 2577006
ucugccagugucaacucca

SEQ ID NO: 2577008 - RNA, 19 nt, Artificial Sequence
  Description of Artificial Sequence: Synthetic oligonucleotide
  Sense strand starting at position 3592 of SEQ ID NO: 1889065
ggaguugacacuggcagaa

SEQ ID NO: 2577009 - RNA, 19 nt, Artificial Sequence
  Description of Artificial Sequence: Synthetic oligonucleotide
  Antisense strand to SEQ ID NO: 2577008
uucugccagugucaacucc

SEQ ID NO: 2577010 - RNA, 19 nt, Artificial Sequence
  Description of Artificial Sequence: Synthetic oligonucleotide
  Sense strand starting at position 3633 of SEQ ID NO: 1889065
agagcucucuccucacaga

SEQ ID NO: 2577011 - RNA, 19 nt, Artificial Sequence
  Description of Artificial Sequence: Synthetic oligonucleotide
  Antisense strand to SEQ ID NO: 2577010
ucugugaggagagagcucu

SEQ ID NO: 2577012 - RNA, 19 nt, Artificial Sequence
  Description of Artificial Sequence: Synthetic oligonucleotide
  Sense strand starting at position 3654 of SEQ ID NO: 1889065
aaguccauuccaugaggau

SEQ ID NO: 2577013 - RNA, 19 nt, Artificial Sequence
  Description of Artificial Sequence: Synthetic oligonucleotide
  Antisense strand to SEQ ID NO: 2577012
auccucauggaauggacuu

SEQ ID NO: 2577014 - RNA, 19 nt, Artificial Sequence
  Description of Artificial Sequence: Synthetic oligonucleotide
  Sense strand starting at position 3718 of SEQ ID NO: 1889065
cauggcugccuggaaugau

SEQ ID NO: 2577015 - RNA, 19 nt, Artificial Sequence
  Description of Artificial Sequence: Synthetic oligonucleotide
  Antisense strand to SEQ ID NO: 2577014
aucauuccaggcagccaug

SEQ ID NO: 2577016 - RNA, 19 nt, Artificial Sequence
  Description of Artificial Sequence: Synthetic oligonucleotide
  Sense strand starting at position 3798 of SEQ ID NO: 1889065
ccauguguagcacauaaua

SEQ ID NO: 2577017 - RNA, 19 nt, Artificial Sequence
  Description of Artificial Sequence: Synthetic oligonucleotide
  Antisense strand to SEQ ID NO: 2577016
uauuaugugcuacacaugg

SEQ ID NO: 2577018 - RNA, 19 nt, Artificial Sequence
  Description of Artificial Sequence: Synthetic oligonucleotide
  Sense strand starting at position 3926 of SEQ ID NO: 1889065
agaagaguuccuugaaggc

SEQ ID NO: 2577019 - RNA, 19 nt, Artificial Sequence
  Description of Artificial Sequence: Synthetic oligonucleotide
  Antisense strand to SEQ ID NO: 2577018
gccuucaaggaacucuucu

SEQ ID NO: 2577020 - RNA, 19 nt, Artificial Sequence
  Description of Artificial Sequence: Synthetic oligonucleotide
  Sense strand starting at position 2706 of SEQ ID NO: 1889067
aggugcauuaagugacuaa

SEQ ID NO: 2577021 - RNA, 19 nt, Artificial Sequence
  Description of Artificial Sequence: Synthetic oligonucleotide
  Antisense strand to SEQ ID NO: 2577020
uuagucacuuaaugcaccu

SEQ ID NO: 2577022 - RNA, 19 nt, Artificial Sequence
  Description of Artificial Sequence: Synthetic oligonucleotide
  Sense strand starting at position 2707 of SEQ ID NO: 1889067
ggugcauuaagugacuaau

SEQ ID NO: 2577023 - RNA, 19 nt, Artificial Sequence
  Description of Artificial Sequence: Synthetic oligonucleotide
  Antisense strand to SEQ ID NO: 2577022
auuagucacuuaaugcacc

SEQ ID NO: 2577024 - RNA, 19 nt, Artificial Sequence
  Description of Artificial Sequence: Synthetic oligonucleotide
  Sense strand starting at position 2709 of SEQ ID NO: 1889067
ugcauuaagugacuaauga

SEQ ID NO: 2577025 - RNA, 19 nt, Artificial Sequence
  Description of Artificial Sequence: Synthetic oligonucleotide
  Antisense strand to SEQ ID NO: 2577024
ucauuagucacuuaaugca

SEQ ID NO: 2577026 - RNA, 19 nt, Artificial Sequence
  Description of Artificial Sequence: Synthetic oligonucleotide
  Sense strand starting at position 2713 of SEQ ID NO: 1889067
uuaagugacuaaugaaaga

SEQ ID NO: 2577027 - RNA, 19 nt, Artificial Sequence
  Description of Artificial Sequence: Synthetic oligonucleotide
  Antisense strand to SEQ ID NO: 2577026
ucuuucauuagucacuuaa

SEQ ID NO: 2577028 - RNA, 19 nt, Artificial Sequence
  Description of Artificial Sequence: Synthetic oligonucleotide
  Sense strand starting at position 2733 of SEQ ID NO: 1889067
cagagcuacugugagaaca

SEQ ID NO: 2577029 - RNA, 19 nt, Artificial Sequence
  Description of Artificial Sequence: Synthetic oligonucleotide
  Antisense strand to SEQ ID NO: 2577028
uguucucacaguagcucug

SEQ ID NO: 2577030 - RNA, 19 nt, Artificial Sequence
  Description of Artificial Sequence: Synthetic oligonucleotide
  Sense strand starting at position 2735 of SEQ ID NO: 1889067
gagcuacugugagaacagu

SEQ ID NO: 2577031 - RNA, 19 nt, Artificial Sequence
  Description of Artificial Sequence: Synthetic oligonucleotide
  Antisense strand to SEQ ID NO: 2577030
acuguucucacaguagcuc

SEQ ID NO: 2577032 - RNA, 19 nt, Artificial Sequence
  Description of Artificial Sequence: Synthetic oligonucleotide
  Sense strand starting at position 2982 of SEQ ID NO: 1889067
aaguaagaugagugaaagu

SEQ ID NO: 2577033 - RNA, 19 nt, Artificial Sequence
  Description of Artificial Sequence: Synthetic oligonucleotide
  Antisense strand to SEQ ID NO: 2577032
acuuucacucaucuuacuu

SEQ ID NO: 2577034 - RNA, 19 nt, Artificial Sequence
  Description of Artificial Sequence: Synthetic oligonucleotide
  Sense strand starting at position 3025 of SEQ ID NO: 1889067
cuaugaauacuaugcagca

SEQ ID NO: 2577035 - RNA, 19 nt, Artificial Sequence
  Description of Artificial Sequence: Synthetic oligonucleotide
  Antisense strand to SEQ ID NO: 2577034
ugcugcauaguauucauag

SEQ ID NO: 2577036 - RNA, 19 nt, Artificial Sequence
  Description of Artificial Sequence: Synthetic oligonucleotide
  Sense strand starting at position 3056 of SEQ ID NO: 1889067
uaauuaguugcauauagag

SEQ ID NO: 2577037 - RNA, 19 nt, Artificial Sequence
  Description of Artificial Sequence: Synthetic oligonucleotide
  Antisense strand to SEQ ID NO: 2577036
cucuauaugcaacuaauua

SEQ ID NO: 2577038 - RNA, 19 nt, Artificial Sequence
  Description of Artificial Sequence: Synthetic oligonucleotide
  Sense strand starting at position 3444 of SEQ ID NO: 1889067
agcagaauauuauucguua

SEQ ID NO: 2577039 - RNA, 19 nt, Artificial Sequence
  Description of Artificial Sequence: Synthetic oligonucleotide
  Antisense strand to SEQ ID NO: 2577038
uaacgaauaauauucugcu

SEQ ID NO: 2577040 - RNA, 19 nt, Artificial Sequence
  Description of Artificial Sequence: Synthetic oligonucleotide
  Sense strand starting at position 3445 of SEQ ID NO: 1889067
gcagaauauuauucguuaa

SEQ ID NO: 2577041 - RNA, 19 nt, Artificial Sequence
  Description of Artificial Sequence: Synthetic oligonucleotide
  Antisense strand to SEQ ID NO: 2577040
uuaacgaauaauauucugc

SEQ ID NO: 2577042 - RNA, 19 nt, Artificial Sequence
  Description of Artificial Sequence: Synthetic oligonucleotide
  Sense strand starting at position 3495 of SEQ ID NO: 1889067
acaaacauguauuaggaua

SEQ ID NO: 2577043 - RNA, 19 nt, Artificial Sequence
  Description of Artificial Sequence: Synthetic oligonucleotide
  Antisense strand to SEQ ID NO: 2577042
uauccuaauacauguuugu

SEQ ID NO: 2577044 - RNA, 19 nt, Artificial Sequence
  Description of Artificial Sequence: Synthetic oligonucleotide
  Sense strand starting at position 3527 of SEQ ID NO: 1889067
uaaguaccauggugguaau

SEQ ID NO: 2577045 - RNA, 19 nt, Artificial Sequence
  Description of Artificial Sequence: Synthetic oligonucleotide
  Antisense strand to SEQ ID NO: 2577044
auuaccaccaugguacuua

SEQ ID NO: 2577046 - RNA, 19 nt, Artificial Sequence
  Description of Artificial Sequence: Synthetic oligonucleotide
  Sense strand starting at position 3528 of SEQ ID NO: 1889067
aaguaccauggugguaaua

SEQ ID NO: 2577047 - RNA, 19 nt, Artificial Sequence
  Description of Artificial Sequence: Synthetic oligonucleotide
  Antisense strand to SEQ ID NO: 2577046
uauuaccaccaugguacuu

SEQ ID NO: 2577048 - RNA, 19 nt, Artificial Sequence
  Description of Artificial Sequence: Synthetic oligonucleotide
  Sense strand starting at position 3530 of SEQ ID NO: 1889067
guaccauggugguaauaua

SEQ ID NO: 2577049 - RNA, 19 nt, Artificial Sequence
  Description of Artificial Sequence: Synthetic oligonucleotide
  Antisense strand to SEQ ID NO: 2577048
uauauuaccaccaugguac

SEQ ID NO: 2577050 - RNA, 19 nt, Artificial Sequence
  Description of Artificial Sequence: Synthetic oligonucleotide
  Sense strand starting at position 3558 of SEQ ID NO: 1889067
ggaagugaguguggacauu

SEQ ID NO: 2577051 - RNA, 19 nt, Artificial Sequence
  Description of Artificial Sequence: Synthetic oligonucleotide
  Antisense strand to SEQ ID NO: 2577050
aauguccacacucacuucc

SEQ ID NO: 2577052 - RNA, 19 nt, Artificial Sequence
  Description of Artificial Sequence: Synthetic oligonucleotide
  Sense strand starting at position 3564 of SEQ ID NO: 1889067
gaguguggacauugagaca

SEQ ID NO: 2577053 - RNA, 19 nt, Artificial Sequence
  Description of Artificial Sequence: Synthetic oligonucleotide
  Antisense strand to SEQ ID NO: 2577052
ugucucaauguccacacuc

SEQ ID NO: 2577054 - RNA, 19 nt, Artificial Sequence
  Description of Artificial Sequence: Synthetic oligonucleotide
  Sense strand starting at position 3567 of SEQ ID NO: 1889067
uguggacauugagacaaau

SEQ ID NO: 2577055 - RNA, 19 nt, Artificial Sequence
  Description of Artificial Sequence: Synthetic oligonucleotide
  Antisense strand to SEQ ID NO: 2577054
auuugucucaauguccaca

SEQ ID NO: 2577056 - RNA, 19 nt, Artificial Sequence
  Description of Artificial Sequence: Synthetic oligonucleotide
  Sense strand starting at position 3640 of SEQ ID NO: 1889067
auaggcugcuaauaugaga

SEQ ID NO: 2577057 - RNA, 19 nt, Artificial Sequence
  Description of Artificial Sequence: Synthetic oligonucleotide
  Antisense strand to SEQ ID NO: 2577056
ucucauauuagcagccuau

SEQ ID NO: 2577058 - RNA, 19 nt, Artificial Sequence
  Description of Artificial Sequence: Synthetic oligonucleotide
  Sense strand starting at position 3643 of SEQ ID NO: 1889067
ggcugcuaauaugagaaau

SEQ ID NO: 2577059 - RNA, 19 nt, Artificial Sequence
  Description of Artificial Sequence: Synthetic oligonucleotide
  Antisense strand to SEQ ID NO: 2577058
auuucucauauuagcagcc

SEQ ID NO: 2577060 - RNA, 19 nt, Artificial Sequence
  Description of Artificial Sequence: Synthetic oligonucleotide
  Sense strand starting at position 3645 of SEQ ID NO: 1889067
cugcuaauaugagaaauag

SEQ ID NO: 2577061 - RNA, 19 nt, Artificial Sequence
  Description of Artificial Sequence: Synthetic oligonucleotide
  Antisense strand to SEQ ID NO: 2577060
cuauuucucauauuagcag

SEQ ID NO: 2577062 - RNA, 19 nt, Artificial Sequence
  Description of Artificial Sequence: Synthetic oligonucleotide
  Sense strand starting at position 3662 of SEQ ID NO: 1889067
aggaguaauugagcucucu

SEQ ID NO: 2577063 - RNA, 19 nt, Artificial Sequence
  Description of Artificial Sequence: Synthetic oligonucleotide
  Antisense strand to SEQ ID NO: 2577062
agagagcucaauuacuccu

SEQ ID NO: 2577064 - RNA, 19 nt, Artificial Sequence
  Description of Artificial Sequence: Synthetic oligonucleotide
  Sense strand starting at position 23 of SEQ ID NO: 1889068
gugcauaccuguccucaua

SEQ ID NO: 2577065 - RNA, 19 nt, Artificial Sequence
  Description of Artificial Sequence: Synthetic oligonucleotide
  Antisense strand to SEQ ID NO: 2577064
uaugaggacagguaugcac

SEQ ID NO: 2577066 - RNA, 19 nt, Artificial Sequence
  Description of Artificial Sequence: Synthetic oligonucleotide
  Sense strand starting at position 25 of SEQ ID NO: 1889068
gcauaccuguccucauaga

SEQ ID NO: 2577067 - RNA, 19 nt, Artificial Sequence
  Description of Artificial Sequence: Synthetic oligonucleotide
  Antisense strand to SEQ ID NO: 2577066
ucuaugaggacagguaugc

SEQ ID NO: 2577068 - RNA, 19 nt, Artificial Sequence
  Description of Artificial Sequence: Synthetic oligonucleotide
  Sense strand starting at position 184 of SEQ ID NO: 1889068
ccgagaaccuuugaggugu

SEQ ID NO: 2577069 - RNA, 19 nt, Artificial Sequence
  Description of Artificial Sequence: Synthetic oligonucleotide
  Antisense strand to SEQ ID NO: 2577068
acaccucaaagguucucgg

SEQ ID NO: 2577070 - RNA, 19 nt, Artificial Sequence
  Description of Artificial Sequence: Synthetic oligonucleotide
  Sense strand starting at position 223 of SEQ ID NO: 1889068
agagucagaucacuucuca

SEQ ID NO: 2577071 - RNA, 19 nt, Artificial Sequence
  Description of Artificial Sequence: Synthetic oligonucleotide
  Antisense strand to SEQ ID NO: 2577070
ugagaagugaucugacucu

SEQ ID NO: 2577072 - RNA, 19 nt, Artificial Sequence
  Description of Artificial Sequence: Synthetic oligonucleotide
  Sense strand starting at position 341 of SEQ ID NO: 1889068
aaagacagggcuugcuaua

SEQ ID NO: 2577073 - RNA, 19 nt, Artificial Sequence
  Description of Artificial Sequence: Synthetic oligonucleotide
  Antisense strand to SEQ ID NO: 2577072
uauagcaagcccugucuuu

SEQ ID NO: 2577074 - RNA, 19 nt, Artificial Sequence
  Description of Artificial Sequence: Synthetic oligonucleotide
  Sense strand starting at position 346 of SEQ ID NO: 1889068
cagggcuugcuauauguuu

SEQ ID NO: 2577075 - RNA, 19 nt, Artificial Sequence
  Description of Artificial Sequence: Synthetic oligonucleotide
  Antisense strand to SEQ ID NO: 2577074
aaacauauagcaagcccug

SEQ ID NO: 2577076 - RNA, 19 nt, Artificial Sequence
  Description of Artificial Sequence: Synthetic oligonucleotide
  Sense strand starting at position 351 of SEQ ID NO: 1889068
cuugcuauauguuuacuga

SEQ ID NO: 2577077 - RNA, 19 nt, Artificial Sequence
  Description of Artificial Sequence: Synthetic oligonucleotide
  Antisense strand to SEQ ID NO: 2577076
ucaguaaacauauagcaag

SEQ ID NO: 2577078 - RNA, 19 nt, Artificial Sequence
  Description of Artificial Sequence: Synthetic oligonucleotide
  Sense strand starting at position 354 of SEQ ID NO: 1889068
gcuauauguuuacugaccu

SEQ ID NO: 2577079 - RNA, 19 nt, Artificial Sequence
  Description of Artificial Sequence: Synthetic oligonucleotide
  Antisense strand to SEQ ID NO: 2577078
aggucaguaaacauauagc

SEQ ID NO: 2577080 - RNA, 19 nt, Artificial Sequence
  Description of Artificial Sequence: Synthetic oligonucleotide
  Sense strand starting at position 366 of SEQ ID NO: 1889068
cugaccuguuuacaaaguu

SEQ ID NO: 2577081 - RNA, 19 nt, Artificial Sequence
  Description of Artificial Sequence: Synthetic oligonucleotide
  Antisense strand to SEQ ID NO: 2577080
aacuuuguaaacaggucag

SEQ ID NO: 2577082 - RNA, 19 nt, Artificial Sequence
  Description of Artificial Sequence: Synthetic oligonucleotide
  Sense strand starting at position 376 of SEQ ID NO: 1889068
uacaaaguuuguguguuua

SEQ ID NO: 2577083 - RNA, 19 nt, Artificial Sequence
  Description of Artificial Sequence: Synthetic oligonucleotide
  Antisense strand to SEQ ID NO: 2577082
uaaacacacaaacuuugua

SEQ ID NO: 2577084 - RNA, 19 nt, Artificial Sequence
  Description of Artificial Sequence: Synthetic oligonucleotide
  Sense strand starting at position 378 of SEQ ID NO: 1889068
caaaguuuguguguuuacu

SEQ ID NO: 2577085 - RNA, 19 nt, Artificial Sequence
  Description of Artificial Sequence: Synthetic oligonucleotide
  Antisense strand to SEQ ID NO: 2577084
aguaaacacacaaacuuug

SEQ ID NO: 2577086 - RNA, 19 nt, Artificial Sequence
  Description of Artificial Sequence: Synthetic oligonucleotide
  Sense strand starting at position 387 of SEQ ID NO: 1889068
uguguuuacugguuuacuu

SEQ ID NO: 2577087 - RNA, 19 nt, Artificial Sequence
  Description of Artificial Sequence: Synthetic oligonucleotide
  Antisense strand to SEQ ID NO: 2577086
aaguaaaccaguaaacaca

SEQ ID NO: 2577088 - RNA, 19 nt, Artificial Sequence
  Description of Artificial Sequence: Synthetic oligonucleotide
  Sense strand starting at position 394 of SEQ ID NO: 1889068
acugguuuacuuggcauau

SEQ ID NO: 2577089 - RNA, 19 nt, Artificial Sequence
  Description of Artificial Sequence: Synthetic oligonucleotide
  Antisense strand to SEQ ID NO: 2577088
auaugccaaguaaaccagu

SEQ ID NO: 2577090 - RNA, 19 nt, Artificial Sequence
  Description of Artificial Sequence: Synthetic oligonucleotide
  Sense strand starting at position 395 of SEQ ID NO: 1889068
cugguuuacuuggcauauu

SEQ ID NO: 2577091 - RNA, 19 nt, Artificial Sequence
  Description of Artificial Sequence: Synthetic oligonucleotide
  Antisense strand to SEQ ID NO: 2577090
aauaugccaaguaaaccag

SEQ ID NO: 2577092 - RNA, 19 nt, Artificial Sequence
  Description of Artificial Sequence: Synthetic oligonucleotide
  Sense strand starting at position 396 of SEQ ID NO: 1889068
ugguuuacuuggcauauua

SEQ ID NO: 2577093 - RNA, 19 nt, Artificial Sequence
  Description of Artificial Sequence: Synthetic oligonucleotide
  Antisense strand to SEQ ID NO: 2577092
uaauaugccaaguaaacca

SEQ ID NO: 2577094 - RNA, 19 nt, Artificial Sequence
  Description of Artificial Sequence: Synthetic oligonucleotide
  Sense strand starting at position 398 of SEQ ID NO: 1889068
guuuacuuggcauauuauc

SEQ ID NO: 2577095 - RNA, 19 nt, Artificial Sequence
  Description of Artificial Sequence: Synthetic oligonucleotide
  Antisense strand to SEQ ID NO: 2577094
gauaauaugccaaguaaac

SEQ ID NO: 2577096 - RNA, 19 nt, Artificial Sequence
  Description of Artificial Sequence: Synthetic oligonucleotide
  Sense strand starting at position 466 of SEQ ID NO: 1889068
ugaugaaagucaguggagu

SEQ ID NO: 2577097 - RNA, 19 nt, Artificial Sequence
  Description of Artificial Sequence: Synthetic oligonucleotide
  Antisense strand to SEQ ID NO: 2577096
acuccacugacuuucauca

SEQ ID NO: 2577098 - RNA, 19 nt, Artificial Sequence
  Description of Artificial Sequence: Synthetic oligonucleotide
  Sense strand starting at position 2141 of SEQ ID NO: 1889068
uuguguauacaaggauaau

SEQ ID NO: 2577099 - RNA, 19 nt, Artificial Sequence
  Description of Artificial Sequence: Synthetic oligonucleotide
  Antisense strand to SEQ ID NO: 2577098
auuauccuuguauacacaa

SEQ ID NO: 2577100 - RNA, 19 nt, Artificial Sequence
  Description of Artificial Sequence: Synthetic oligonucleotide
  Sense strand starting at position 2181 of SEQ ID NO: 1889068
gggugaguuugcuaaucau

SEQ ID NO: 2577101 - RNA, 19 nt, Artificial Sequence
  Description of Artificial Sequence: Synthetic oligonucleotide
  Antisense strand to SEQ ID NO: 2577100
augauuagcaaacucaccc

SEQ ID NO: 2577102 - RNA, 19 nt, Artificial Sequence
  Description of Artificial Sequence: Synthetic oligonucleotide
  Sense strand starting at position 2589 of SEQ ID NO: 1889068
gcagcacaaucuuguccaa

SEQ ID NO: 2577103 - RNA, 19 nt, Artificial Sequence
  Description of Artificial Sequence: Synthetic oligonucleotide
  Antisense strand to SEQ ID NO: 2577102
uuggacaagauugugcugc

SEQ ID NO: 2577104 - RNA, 19 nt, Artificial Sequence
  Description of Artificial Sequence: Synthetic oligonucleotide
  Sense strand starting at position 2592 of SEQ ID NO: 1889068
gcacaaucuuguccaagca

SEQ ID NO: 2577105 - RNA, 19 nt, Artificial Sequence
  Description of Artificial Sequence: Synthetic oligonucleotide
  Antisense strand to SEQ ID NO: 2577104
ugcuuggacaagauugugc

SEQ ID NO: 2577106 - RNA, 19 nt, Artificial Sequence
  Description of Artificial Sequence: Synthetic oligonucleotide
  Sense strand starting at position 2647 of SEQ ID NO: 1889068
caaagacgccuugaaaguu

SEQ ID NO: 2577107 - RNA, 19 nt, Artificial Sequence
  Description of Artificial Sequence: Synthetic oligonucleotide
  Antisense strand to SEQ ID NO: 2577106
aacuuucaaggcgucuuug

SEQ ID NO: 2577108 - RNA, 19 nt, Artificial Sequence
  Description of Artificial Sequence: Synthetic oligonucleotide
  Sense strand starting at position 2704 of SEQ ID NO: 1889068
ugaguaaggucgguugugu

SEQ ID NO: 2577109 - RNA, 19 nt, Artificial Sequence
  Description of Artificial Sequence: Synthetic oligonucleotide
  Antisense strand to SEQ ID NO: 2577108
acacaaccgaccuuacuca

SEQ ID NO: 2577110 - RNA, 19 nt, Artificial Sequence
  Description of Artificial Sequence: Synthetic oligonucleotide
  Sense strand starting at position 2723 of SEQ ID NO: 1889068
gugugugacugggaugguu

SEQ ID NO: 2577111 - RNA, 19 nt, Artificial Sequence
  Description of Artificial Sequence: Synthetic oligonucleotide
  Antisense strand to SEQ ID NO: 2577110
aaccaucccagucacacac

SEQ ID NO: 2577112 - RNA, 19 nt, Artificial Sequence
  Description of Artificial Sequence: Synthetic oligonucleotide
  Sense strand starting at position 2768 of SEQ ID NO: 1889068
aggcuugaguuucuuucuu

SEQ ID NO: 2577113 - RNA, 19 nt, Artificial Sequence
  Description of Artificial Sequence: Synthetic oligonucleotide
  Antisense strand to SEQ ID NO: 2577112
aagaaagaaacucaagccu

SEQ ID NO: 2577114 - RNA, 19 nt, Artificial Sequence
  Description of Artificial Sequence: Synthetic oligonucleotide
  Sense strand starting at position 3092 of SEQ ID NO: 1889068
aggcuugaguuucuaaaga

SEQ ID NO: 2577115 - RNA, 19 nt, Artificial Sequence
  Description of Artificial Sequence: Synthetic oligonucleotide
  Antisense strand to SEQ ID NO: 2577114
ucuuuagaaacucaagccu

SEQ ID NO: 2577116 - RNA, 19 nt, Artificial Sequence
  Description of Artificial Sequence: Synthetic oligonucleotide
  Sense strand starting at position 3217 of SEQ ID NO: 1889068
ucuuaacguuaucagggua

SEQ ID NO: 2577117 - RNA, 19 nt, Artificial Sequence
  Description of Artificial Sequence: Synthetic oligonucleotide
  Antisense strand to SEQ ID NO: 2577116
uacccugauaacguuaaga

SEQ ID NO: 2577118 - RNA, 19 nt, Artificial Sequence
  Description of Artificial Sequence: Synthetic oligonucleotide
  Sense strand starting at position 3220 of SEQ ID NO: 1889068
uaacguuaucaggguaaac

SEQ ID NO: 2577119 - RNA, 19 nt, Artificial Sequence
  Description of Artificial Sequence: Synthetic oligonucleotide
  Antisense strand to SEQ ID NO: 2577118
guuuacccugauaacguua

SEQ ID NO: 2577120 - RNA, 19 nt, Artificial Sequence
  Description of Artificial Sequence: Synthetic oligonucleotide
  Sense strand starting at position 3222 of SEQ ID NO: 1889068
acguuaucaggguaaacuu

SEQ ID NO: 2577121 - RNA, 19 nt, Artificial Sequence
  Description of Artificial Sequence: Synthetic oligonucleotide
  Antisense strand to SEQ ID NO: 2577120
aaguuuacccugauaacgu

SEQ ID NO: 2577122 - RNA, 19 nt, Artificial Sequence
  Description of Artificial Sequence: Synthetic oligonucleotide
  Sense strand starting at position 3231 of SEQ ID NO: 1889068
ggguaaacuuccuguugga

SEQ ID NO: 2577123 - RNA, 19 nt, Artificial Sequence
  Description of Artificial Sequence: Synthetic oligonucleotide
  Antisense strand to SEQ ID NO: 2577122
uccaacaggaaguuuaccc

SEQ ID NO: 2577124 - RNA, 19 nt, Artificial Sequence
  Description of Artificial Sequence: Synthetic oligonucleotide
  Sense strand starting at position 3241 of SEQ ID NO: 1889068
ccuguuggaucuuaacauc

SEQ ID NO: 2577125 - RNA, 19 nt, Artificial Sequence
  Description of Artificial Sequence: Synthetic oligonucleotide
  Antisense strand to SEQ ID NO: 2577124
gauguuaagauccaacagg

SEQ ID NO: 2577126 - RNA, 19 nt, Artificial Sequence
  Description of Artificial Sequence: Synthetic oligonucleotide
  Sense strand starting at position 3244 of SEQ ID NO: 1889068
guuggaucuuaacaucaac

SEQ ID NO: 2577127 - RNA, 19 nt, Artificial Sequence
  Description of Artificial Sequence: Synthetic oligonucleotide
  Antisense strand to SEQ ID NO: 2577126
guugauguuaagauccaac

SEQ ID NO: 2577128 - RNA, 19 nt, Artificial Sequence
  Description of Artificial Sequence: Synthetic oligonucleotide
  Sense strand starting at position 3340 of SEQ ID NO: 1889068
accgaaagaucacacugua

SEQ ID NO: 2577129 - RNA, 19 nt, Artificial Sequence
  Description of Artificial Sequence: Synthetic oligonucleotide
  Antisense strand to SEQ ID NO: 2577128
uacagugugaucuuucggu

SEQ ID NO: 2577130 - RNA, 19 nt, Artificial Sequence
  Description of Artificial Sequence: Synthetic oligonucleotide
  Sense strand starting at position 3343 of SEQ ID NO: 1889068
gaaagaucacacuguauug

SEQ ID NO: 2577131 - RNA, 19 nt, Artificial Sequence
  Description of Artificial Sequence: Synthetic oligonucleotide
  Antisense strand to SEQ ID NO: 2577130
caauacagugugaucuuuc

SEQ ID NO: 2577132 - RNA, 19 nt, Artificial Sequence
  Description of Artificial Sequence: Synthetic oligonucleotide
  Sense strand starting at position 3353 of SEQ ID NO: 1889068
acuguauuguguugacuca

SEQ ID NO: 2577133 - RNA, 19 nt, Artificial Sequence
  Description of Artificial Sequence: Synthetic oligonucleotide
  Antisense strand to SEQ ID NO: 2577132
ugagucaacacaauacagu

SEQ ID NO: 2577134 - RNA, 19 nt, Artificial Sequence
  Description of Artificial Sequence: Synthetic oligonucleotide
  Sense strand starting at position 3376 of SEQ ID NO: 1889068
cucccuugucccuguaaca

SEQ ID NO: 2577135 - RNA, 19 nt, Artificial Sequence
  Description of Artificial Sequence: Synthetic oligonucleotide
  Antisense strand to SEQ ID NO: 2577134
uguuacagggacaagggag

SEQ ID NO: 2577136 - RNA, 19 nt, Artificial Sequence
  Description of Artificial Sequence: Synthetic oligonucleotide
  Sense strand starting at position 3387 of SEQ ID NO: 1889068
cuguaacaagcuuaucagu

SEQ ID NO: 2577137 - RNA, 19 nt, Artificial Sequence
  Description of Artificial Sequence: Synthetic oligonucleotide
  Antisense strand to SEQ ID NO: 2577136
acugauaagcuuguuacag

SEQ ID NO: 2577138 - RNA, 19 nt, Artificial Sequence
  Description of Artificial Sequence: Synthetic oligonucleotide
  Sense strand starting at position 3389 of SEQ ID NO: 1889068
guaacaagcuuaucagugu

SEQ ID NO: 2577139 - RNA, 19 nt, Artificial Sequence
  Description of Artificial Sequence: Synthetic oligonucleotide
  Antisense strand to SEQ ID NO: 2577138
acacugauaagcuuguuac

SEQ ID NO: 2577140 - RNA, 19 nt, Artificial Sequence
  Description of Artificial Sequence: Synthetic oligonucleotide
  Sense strand starting at position 3518 of SEQ ID NO: 1889068
cuggguacuguucaaggua

SEQ ID NO: 2577141 - RNA, 19 nt, Artificial Sequence
  Description of Artificial Sequence: Synthetic oligonucleotide
  Antisense strand to SEQ ID NO: 2577140
uaccuugaacaguacccag

SEQ ID NO: 2577142 - RNA, 19 nt, Artificial Sequence
  Description of Artificial Sequence: Synthetic oligonucleotide
  Sense strand starting at position 3923 of SEQ ID NO: 1889068
aucugaagcccagggaauu

SEQ ID NO: 2577143 - RNA, 19 nt, Artificial Sequence
  Description of Artificial Sequence: Synthetic oligonucleotide
  Antisense strand to SEQ ID NO: 2577142
aauucccugggcuucagau

SEQ ID NO: 2577144 - RNA, 19 nt, Artificial Sequence
  Description of Artificial Sequence: Synthetic oligonucleotide
  Sense strand starting at position 291 of SEQ ID NO: 1889069
gccaacuuugagcaaaugu

SEQ ID NO: 2577145 - RNA, 19 nt, Artificial Sequence
  Description of Artificial Sequence: Synthetic oligonucleotide
  Antisense strand to SEQ ID NO: 2577144
acauuugcucaaaguuggc

SEQ ID NO: 2577146 - RNA, 19 nt, Artificial Sequence
  Description of Artificial Sequence: Synthetic oligonucleotide
  Sense strand starting at position 298 of SEQ ID NO: 1889069
uugagcaaauguuugguau

SEQ ID NO: 2577147 - RNA, 19 nt, Artificial Sequence
  Description of Artificial Sequence: Synthetic oligonucleotide
  Antisense strand to SEQ ID NO: 2577146
auaccaaacauuugcucaa

SEQ ID NO: 2577148 - RNA, 19 nt, Artificial Sequence
  Description of Artificial Sequence: Synthetic oligonucleotide
  Sense strand starting at position 299 of SEQ ID NO: 1889069
ugagcaaauguuugguauc

SEQ ID NO: 2577149 - RNA, 19 nt, Artificial Sequence
  Description of Artificial Sequence: Synthetic oligonucleotide
  Antisense strand to SEQ ID NO: 2577148
gauaccaaacauuugcuca

SEQ ID NO: 2577150 - RNA, 19 nt, Artificial Sequence
  Description of Artificial Sequence: Synthetic oligonucleotide
  Sense strand starting at position 301 of SEQ ID NO: 1889069
agcaaauguuugguaucuu

SEQ ID NO: 2577151 - RNA, 19 nt, Artificial Sequence
  Description of Artificial Sequence: Synthetic oligonucleotide
  Antisense strand to SEQ ID NO: 2577150
aagauaccaaacauuugcu

SEQ ID NO: 2577152 - RNA, 19 nt, Artificial Sequence
  Description of Artificial Sequence: Synthetic oligonucleotide
  Sense strand starting at position 328 of SEQ ID NO: 1889069
guucucuuugcuccuguua

SEQ ID NO: 2577153 - RNA, 19 nt, Artificial Sequence
  Description of Artificial Sequence: Synthetic oligonucleotide
  Antisense strand to SEQ ID NO: 2577152
uaacaggagcaaagagaac

SEQ ID NO: 2577154 - RNA, 19 nt, Artificial Sequence
  Description of Artificial Sequence: Synthetic oligonucleotide
  Sense strand starting at position 620 of SEQ ID NO: 1889069
agguaugucuuauuauaag

SEQ ID NO: 2577155 - RNA, 19 nt, Artificial Sequence
  Description of Artificial Sequence: Synthetic oligonucleotide
  Antisense strand to SEQ ID NO: 2577154
cuuauaauaagacauaccu

SEQ ID NO: 2577156 - RNA, 19 nt, Artificial Sequence
  Description of Artificial Sequence: Synthetic oligonucleotide
  Sense strand starting at position 632 of SEQ ID NO: 1889069
uuauaaguaugucuagaga

SEQ ID NO: 2577157 - RNA, 19 nt, Artificial Sequence
  Description of Artificial Sequence: Synthetic oligonucleotide
  Antisense strand to SEQ ID NO: 2577156
ucucuagacauacuuauaa

SEQ ID NO: 2577158 - RNA, 19 nt, Artificial Sequence
  Description of Artificial Sequence: Synthetic oligonucleotide
  Sense strand starting at position 724 of SEQ ID NO: 1889069
agauauccucagggacuuu

SEQ ID NO: 2577159 - RNA, 19 nt, Artificial Sequence
  Description of Artificial Sequence: Synthetic oligonucleotide
  Antisense strand to SEQ ID NO: 2577158
aaagucccugaggauaucu

SEQ ID NO: 2577160 - RNA, 19 nt, Artificial Sequence
  Description of Artificial Sequence: Synthetic oligonucleotide
  Sense strand starting at position 753 of SEQ ID NO: 1889069
uuaaucaauguugggauga

SEQ ID NO: 2577161 - RNA, 19 nt, Artificial Sequence
  Description of Artificial Sequence: Synthetic oligonucleotide
  Antisense strand to SEQ ID NO: 2577160
ucaucccaacauugauuaa

SEQ ID NO: 2577162 - RNA, 19 nt, Artificial Sequence
  Description of Artificial Sequence: Synthetic oligonucleotide
  Sense strand starting at position 763 of SEQ ID NO: 1889069
uugggaugaauguguguaa

SEQ ID NO: 2577163 - RNA, 19 nt, Artificial Sequence
  Description of Artificial Sequence: Synthetic oligonucleotide
  Antisense strand to SEQ ID NO: 2577162
uuacacacauucaucccaa

SEQ ID NO: 2577164 - RNA, 19 nt, Artificial Sequence
  Description of Artificial Sequence: Synthetic oligonucleotide
  Sense strand starting at position 764 of SEQ ID NO: 1889069
ugggaugaauguguguaau

SEQ ID NO: 2577165 - RNA, 19 nt, Artificial Sequence
  Description of Artificial Sequence: Synthetic oligonucleotide
  Antisense strand to SEQ ID NO: 2577164
auuacacacauucauccca

SEQ ID NO: 2577166 - RNA, 19 nt, Artificial Sequence
  Description of Artificial Sequence: Synthetic oligonucleotide
  Sense strand starting at position 766 of SEQ ID NO: 1889069
ggaugaauguguguaaucu

SEQ ID NO: 2577167 - RNA, 19 nt, Artificial Sequence
  Description of Artificial Sequence: Synthetic oligonucleotide
  Antisense strand to SEQ ID NO: 2577166
agauuacacacauucaucc

SEQ ID NO: 2577168 - RNA, 19 nt, Artificial Sequence
  Description of Artificial Sequence: Synthetic oligonucleotide
  Sense strand starting at position 767 of SEQ ID NO: 1889069
gaugaauguguguaaucug

SEQ ID NO: 2577169 - RNA, 19 nt, Artificial Sequence
  Description of Artificial Sequence: Synthetic oligonucleotide
  Antisense strand to SEQ ID NO: 2577168
cagauuacacacauucauc

SEQ ID NO: 2577170 - RNA, 19 nt, Artificial Sequence
  Description of Artificial Sequence: Synthetic oligonucleotide
  Sense strand starting at position 775 of SEQ ID NO: 1889069
uguguaaucuguucugaau

SEQ ID NO: 2577171 - RNA, 19 nt, Artificial Sequence
  Description of Artificial Sequence: Synthetic oligonucleotide
  Antisense strand to SEQ ID NO: 2577170
auucagaacagauuacaca

SEQ ID NO: 2577172 - RNA, 19 nt, Artificial Sequence
  Description of Artificial Sequence: Synthetic oligonucleotide
  Sense strand starting at position 781 of SEQ ID NO: 1889069
aucuguucugaauaagcau

SEQ ID NO: 2577173 - RNA, 19 nt, Artificial Sequence
  Description of Artificial Sequence: Synthetic oligonucleotide
  Antisense strand to SEQ ID NO: 2577172
augcuuauucagaacagau

SEQ ID NO: 2577174 - RNA, 19 nt, Artificial Sequence
  Description of Artificial Sequence: Synthetic oligonucleotide
  Sense strand starting at position 920 of SEQ ID NO: 1889069
gggagaccauuaucagugu

SEQ ID NO: 2577175 - RNA, 19 nt, Artificial Sequence
  Description of Artificial Sequence: Synthetic oligonucleotide
  Antisense strand to SEQ ID NO: 2577174
acacugauaauggucuccc

SEQ ID NO: 2577176 - RNA, 19 nt, Artificial Sequence
  Description of Artificial Sequence: Synthetic oligonucleotide
  Sense strand starting at position 923 of SEQ ID NO: 1889069
agaccauuaucaguguauc

SEQ ID NO: 2577177 - RNA, 19 nt, Artificial Sequence
  Description of Artificial Sequence: Synthetic oligonucleotide
  Antisense strand to SEQ ID NO: 2577176
gauacacugauaauggucu

SEQ ID NO: 2577178 - RNA, 19 nt, Artificial Sequence
  Description of Artificial Sequence: Synthetic oligonucleotide
  Sense strand starting at position 926 of SEQ ID NO: 1889069
ccauuaucaguguauccau

SEQ ID NO: 2577179 - RNA, 19 nt, Artificial Sequence
  Description of Artificial Sequence: Synthetic oligonucleotide
  Antisense strand to SEQ ID NO: 2577178
auggauacacugauaaugg

SEQ ID NO: 2577180 - RNA, 19 nt, Artificial Sequence
  Description of Artificial Sequence: Synthetic oligonucleotide
  Sense strand starting at position 929 of SEQ ID NO: 1889069
uuaucaguguauccauacu

SEQ ID NO: 2577181 - RNA, 19 nt, Artificial Sequence
  Description of Artificial Sequence: Synthetic oligonucleotide
  Antisense strand to SEQ ID NO: 2577180
aguauggauacacugauaa

SEQ ID NO: 2577182 - RNA, 19 nt, Artificial Sequence
  Description of Artificial Sequence: Synthetic oligonucleotide
  Sense strand starting at position 1066 of SEQ ID NO: 1889069
auauguugaucguccucau

SEQ ID NO: 2577183 - RNA, 19 nt, Artificial Sequence
  Description of Artificial Sequence: Synthetic oligonucleotide
  Antisense strand to SEQ ID NO: 2577182
augaggacgaucaacauau

SEQ ID NO: 2577184 - RNA, 19 nt, Artificial Sequence
  Description of Artificial Sequence: Synthetic oligonucleotide
  Sense strand starting at position 1069 of SEQ ID NO: 1889069
uguugaucguccucaucaa

SEQ ID NO: 2577185 - RNA, 19 nt, Artificial Sequence
  Description of Artificial Sequence: Synthetic oligonucleotide
  Antisense strand to SEQ ID NO: 2577184
uugaugaggacgaucaaca

SEQ ID NO: 2577186 - RNA, 19 nt, Artificial Sequence
  Description of Artificial Sequence: Synthetic oligonucleotide
  Sense strand starting at position 1070 of SEQ ID NO: 1889069
guugaucguccucaucaac

SEQ ID NO: 2577187 - RNA, 19 nt, Artificial Sequence
  Description of Artificial Sequence: Synthetic oligonucleotide
  Antisense strand to SEQ ID NO: 2577186
guugaugaggacgaucaac

SEQ ID NO: 2577188 - RNA, 19 nt, Artificial Sequence
  Description of Artificial Sequence: Synthetic oligonucleotide
  Sense strand starting at position 1110 of SEQ ID NO: 1889069
gaauacugcgauugggaaa

SEQ ID NO: 2577189 - RNA, 19 nt, Artificial Sequence
  Description of Artificial Sequence: Synthetic oligonucleotide
  Antisense strand to SEQ ID NO: 2577188
uuucccaaucgcaguauuc

SEQ ID NO: 2577190 - RNA, 19 nt, Artificial Sequence
  Description of Artificial Sequence: Synthetic oligonucleotide
  Sense strand starting at position 1377 of SEQ ID NO: 1889069
ggagacaaguaggaaauua

SEQ ID NO: 2577191 - RNA, 19 nt, Artificial Sequence
  Description of Artificial Sequence: Synthetic oligonucleotide
  Antisense strand to SEQ ID NO: 2577190
uaauuuccuacuugucucc

SEQ ID NO: 2577192 - RNA, 19 nt, Artificial Sequence
  Description of Artificial Sequence: Synthetic oligonucleotide
  Sense strand starting at position 1528 of SEQ ID NO: 1889069
uugagaauuugcuacacag

SEQ ID NO: 2577193 - RNA, 19 nt, Artificial Sequence
  Description of Artificial Sequence: Synthetic oligonucleotide
  Antisense strand to SEQ ID NO: 2577192
cuguguagcaaauucucaa

SEQ ID NO: 2577194 - RNA, 19 nt, Artificial Sequence
  Description of Artificial Sequence: Synthetic oligonucleotide
  Sense strand starting at position 2822 of SEQ ID NO: 1889069
aagucauagucagcacgaa

SEQ ID NO: 2577195 - RNA, 19 nt, Artificial Sequence
  Description of Artificial Sequence: Synthetic oligonucleotide
  Antisense strand to SEQ ID NO: 2577194
uucgugcugacuaugacuu

SEQ ID NO: 2577196 - RNA, 19 nt, Artificial Sequence
  Description of Artificial Sequence: Synthetic oligonucleotide
  Sense strand starting at position 2823 of SEQ ID NO: 1889069
agucauagucagcacgaaa

SEQ ID NO: 2577197 - RNA, 19 nt, Artificial Sequence
  Description of Artificial Sequence: Synthetic oligonucleotide
  Antisense strand to SEQ ID NO: 2577196
uuucgugcugacuaugacu

SEQ ID NO: 2577198 - RNA, 19 nt, Artificial Sequence
  Description of Artificial Sequence: Synthetic oligonucleotide
  Sense strand starting at position 2826 of SEQ ID NO: 1889069
cauagucagcacgaaagaa

SEQ ID NO: 2577199 - RNA, 19 nt, Artificial Sequence
  Description of Artificial Sequence: Synthetic oligonucleotide
  Antisense strand to SEQ ID NO: 2577198
uucuuucgugcugacuaug

SEQ ID NO: 2577200 - RNA, 19 nt, Artificial Sequence
  Description of Artificial Sequence: Synthetic oligonucleotide
  Sense strand starting at position 3364 of SEQ ID NO: 1889069
uuuagauaguggucucacu

SEQ ID NO: 2577201 - RNA, 19 nt, Artificial Sequence
  Description of Artificial Sequence: Synthetic oligonucleotide
  Antisense strand to SEQ ID NO: 2577200
agugagaccacuaucuaaa

SEQ ID NO: 2577202 - RNA, 19 nt, Artificial Sequence
  Description of Artificial Sequence: Synthetic oligonucleotide
  Sense strand starting at position 3492 of SEQ ID NO: 1889069
ccaugcuuccaauaaacgu

SEQ ID NO: 2577203 - RNA, 19 nt, Artificial Sequence
  Description of Artificial Sequence: Synthetic oligonucleotide
  Antisense strand to SEQ ID NO: 2577202
acguuuauuggaagcaugg

SEQ ID NO: 2577204 - RNA, 19 nt, Artificial Sequence
  Description of Artificial Sequence: Synthetic oligonucleotide
  Sense strand starting at position 3514 of SEQ ID NO: 1889069
ugaauaaauucuucuguag

SEQ ID NO: 2577205 - RNA, 19 nt, Artificial Sequence
  Description of Artificial Sequence: Synthetic oligonucleotide
  Antisense strand to SEQ ID NO: 2577204
cuacagaagaauuuauuca

SEQ ID NO: 2577206 - RNA, 19 nt, Artificial Sequence
  Description of Artificial Sequence: Synthetic oligonucleotide
  Sense strand starting at position 3682 of SEQ ID NO: 1889069
aggcucuaggcucaguuau

SEQ ID NO: 2577207 - RNA, 19 nt, Artificial Sequence
  Description of Artificial Sequence: Synthetic oligonucleotide
  Antisense strand to SEQ ID NO: 2577206
auaacugagccuagagccu

SEQ ID NO: 2577208 - RNA, 19 nt, Artificial Sequence
  Description of Artificial Sequence: Synthetic oligonucleotide
  Sense strand starting at position 3684 of SEQ ID NO: 1889069
gcucuaggcucaguuauga

SEQ ID NO: 2577209 - RNA, 19 nt, Artificial Sequence
  Description of Artificial Sequence: Synthetic oligonucleotide
  Antisense strand to SEQ ID NO: 2577208
ucauaacugagccuagagc

SEQ ID NO: 2577210 - RNA, 19 nt, Artificial Sequence
  Description of Artificial Sequence: Synthetic oligonucleotide
  Sense strand starting at position 3733 of SEQ ID NO: 1889069
ucaaauguauguuugugua

SEQ ID NO: 2577211 - RNA, 19 nt, Artificial Sequence
  Description of Artificial Sequence: Synthetic oligonucleotide
  Antisense strand to SEQ ID NO: 2577210
uacacaaacauacauuuga

SEQ ID NO: 2577212 - RNA, 19 nt, Artificial Sequence
  Description of Artificial Sequence: Synthetic oligonucleotide
  Sense strand starting at position 3747 of SEQ ID NO: 1889069
guguauugaccugaucccu

SEQ ID NO: 2577213 - RNA, 19 nt, Artificial Sequence
  Description of Artificial Sequence: Synthetic oligonucleotide
  Antisense strand to SEQ ID NO: 2577212
agggaucaggucaauacac

SEQ ID NO: 2577214 - RNA, 19 nt, Artificial Sequence
  Description of Artificial Sequence: Synthetic oligonucleotide
  Sense strand starting at position 3753 of SEQ ID NO: 1889069
ugaccugaucccugggaca

SEQ ID NO: 2577215 - RNA, 19 nt, Artificial Sequence
  Description of Artificial Sequence: Synthetic oligonucleotide
  Antisense strand to SEQ ID NO: 2577214
ugucccagggaucagguca

SEQ ID NO: 2577216 - RNA, 19 nt, Artificial Sequence
  Description of Artificial Sequence: Synthetic oligonucleotide
  Sense strand starting at position 3781 of SEQ ID NO: 1889069
gacugaaaucaugguauca

SEQ ID NO: 2577217 - RNA, 19 nt, Artificial Sequence
  Description of Artificial Sequence: Synthetic oligonucleotide
  Antisense strand to SEQ ID NO: 2577216
ugauaccaugauuucaguc

SEQ ID NO: 2577218 - RNA, 19 nt, Artificial Sequence
  Description of Artificial Sequence: Synthetic oligonucleotide
  Sense strand starting at position 3845 of SEQ ID NO: 1889069
ucaauccguguguaaauaa

SEQ ID NO: 2577219 - RNA, 19 nt, Artificial Sequence
  Description of Artificial Sequence: Synthetic oligonucleotide
  Antisense strand to SEQ ID NO: 2577218
uuauuuacacacggauuga

SEQ ID NO: 2577220 - RNA, 19 nt, Artificial Sequence
  Description of Artificial Sequence: Synthetic oligonucleotide
  Sense strand starting at position 3882 of SEQ ID NO: 1889069
agauguaugcaauaaugca

SEQ ID NO: 2577221 - RNA, 19 nt, Artificial Sequence
  Description of Artificial Sequence: Synthetic oligonucleotide
  Antisense strand to SEQ ID NO: 2577220
ugcauuauugcauacaucu

SEQ ID NO: 2577222 - RNA, 19 nt, Artificial Sequence
  Description of Artificial Sequence: Synthetic oligonucleotide
  Sense strand starting at position 3951 of SEQ ID NO: 1889069
aacagaucugaucguaauu

SEQ ID NO: 2577223 - RNA, 19 nt, Artificial Sequence
  Description of Artificial Sequence: Synthetic oligonucleotide
  Antisense strand to SEQ ID NO: 2577222
aauuacgaucagaucuguu

SEQ ID NO: 2577224 - RNA, 19 nt, Artificial Sequence
  Description of Artificial Sequence: Synthetic oligonucleotide
  Sense strand starting at position 112 of SEQ ID NO: 1889070
agaugagccucugccacau

SEQ ID NO: 2577225 - RNA, 19 nt, Artificial Sequence
  Description of Artificial Sequence: Synthetic oligonucleotide
  Antisense strand to SEQ ID NO: 2577224
auguggcagaggcucaucu

SEQ ID NO: 2577226 - RNA, 19 nt, Artificial Sequence
  Description of Artificial Sequence: Synthetic oligonucleotide
  Sense strand starting at position 290 of SEQ ID NO: 1889070
gccaacuuugagcaaaugu

SEQ ID NO: 2577227 - RNA, 19 nt, Artificial Sequence
  Description of Artificial Sequence: Synthetic oligonucleotide
  Antisense strand to SEQ ID NO: 2577226
acauuugcucaaaguuggc

SEQ ID NO: 2577228 - RNA, 19 nt, Artificial Sequence
  Description of Artificial Sequence: Synthetic oligonucleotide
  Sense strand starting at position 297 of SEQ ID NO: 1889070
uugagcaaauguuugguau

SEQ ID NO: 2577229 - RNA, 19 nt, Artificial Sequence
  Description of Artificial Sequence: Synthetic oligonucleotide
  Antisense strand to SEQ ID NO: 2577228
auaccaaacauuugcucaa

SEQ ID NO: 2577230 - RNA, 19 nt, Artificial Sequence
  Description of Artificial Sequence: Synthetic oligonucleotide
  Sense strand starting at position 298 of SEQ ID NO: 1889070
ugagcaaauguuugguauc

SEQ ID NO: 2577231 - RNA, 19 nt, Artificial Sequence
  Description of Artificial Sequence: Synthetic oligonucleotide
  Antisense strand to SEQ ID NO: 2577230
gauaccaaacauuugcuca

SEQ ID NO: 2577232 - RNA, 19 nt, Artificial Sequence
  Description of Artificial Sequence: Synthetic oligonucleotide
  Sense strand starting at position 300 of SEQ ID NO: 1889070
agcaaauguuugguaucuu

SEQ ID NO: 2577233 - RNA, 19 nt, Artificial Sequence
  Description of Artificial Sequence: Synthetic oligonucleotide
  Antisense strand to SEQ ID NO: 2577232
aagauaccaaacauuugcu

SEQ ID NO: 2577234 - RNA, 19 nt, Artificial Sequence
  Description of Artificial Sequence: Synthetic oligonucleotide
  Sense strand starting at position 327 of SEQ ID NO: 1889070
guucucuuugcuccuguua

SEQ ID NO: 2577235 - RNA, 19 nt, Artificial Sequence
  Description of Artificial Sequence: Synthetic oligonucleotide
  Antisense strand to SEQ ID NO: 2577234
uaacaggagcaaagagaac

SEQ ID NO: 2577236 - RNA, 19 nt, Artificial Sequence
  Description of Artificial Sequence: Synthetic oligonucleotide
  Sense strand starting at position 619 of SEQ ID NO: 1889070
agguaugucuuauuauaag

SEQ ID NO: 2577237 - RNA, 19 nt, Artificial Sequence
  Description of Artificial Sequence: Synthetic oligonucleotide
  Antisense strand to SEQ ID NO: 2577236
cuuauaauaagacauaccu

SEQ ID NO: 2577238 - RNA, 19 nt, Artificial Sequence
  Description of Artificial Sequence: Synthetic oligonucleotide
  Sense strand starting at position 631 of SEQ ID NO: 1889070
uuauaaguaugucuagaga

SEQ ID NO: 2577239 - RNA, 19 nt, Artificial Sequence
  Description of Artificial Sequence: Synthetic oligonucleotide
  Antisense strand to SEQ ID NO: 2577238
ucucuagacauacuuauaa

SEQ ID NO: 2577240 - RNA, 19 nt, Artificial Sequence
  Description of Artificial Sequence: Synthetic oligonucleotide
  Sense strand starting at position 723 of SEQ ID NO: 1889070
agauauccucagggacuuu

SEQ ID NO: 2577241 - RNA, 19 nt, Artificial Sequence
  Description of Artificial Sequence: Synthetic oligonucleotide
  Antisense strand to SEQ ID NO: 2577240
aaagucccugaggauaucu

SEQ ID NO: 2577242 - RNA, 19 nt, Artificial Sequence
  Description of Artificial Sequence: Synthetic oligonucleotide
  Sense strand starting at position 752 of SEQ ID NO: 1889070
uuaaucaauguugggauga

SEQ ID NO: 2577243 - RNA, 19 nt, Artificial Sequence
  Description of Artificial Sequence: Synthetic oligonucleotide
  Antisense strand to SEQ ID NO: 2577242
ucaucccaacauugauuaa

SEQ ID NO: 2577244 - RNA, 19 nt, Artificial Sequence
  Description of Artificial Sequence: Synthetic oligonucleotide
  Sense strand starting at position 766 of SEQ ID NO: 1889070
gaugaauguguguaaucug

SEQ ID NO: 2577245 - RNA, 19 nt, Artificial Sequence
  Description of Artificial Sequence: Synthetic oligonucleotide
  Antisense strand to SEQ ID NO: 2577244
cagauuacacacauucauc

SEQ ID NO: 2577246 - RNA, 19 nt, Artificial Sequence
  Description of Artificial Sequence: Synthetic oligonucleotide
  Sense strand starting at position 774 of SEQ ID NO: 1889070
uguguaaucuguucugaau

SEQ ID NO: 2577247 - RNA, 19 nt, Artificial Sequence
  Description of Artificial Sequence: Synthetic oligonucleotide
  Antisense strand to SEQ ID NO: 2577246
auucagaacagauuacaca

SEQ ID NO: 2577248 - RNA, 19 nt, Artificial Sequence
  Description of Artificial Sequence: Synthetic oligonucleotide
  Sense strand starting at position 780 of SEQ ID NO: 1889070
aucuguucugaauaagcau

SEQ ID NO: 2577249 - RNA, 19 nt, Artificial Sequence
  Description of Artificial Sequence: Synthetic oligonucleotide
  Antisense strand to SEQ ID NO: 2577248
augcuuauucagaacagau

SEQ ID NO: 2577250 - RNA, 19 nt, Artificial Sequence
  Description of Artificial Sequence: Synthetic oligonucleotide
  Sense strand starting at position 922 of SEQ ID NO: 1889070
agaccauuaucaguguauc

SEQ ID NO: 2577251 - RNA, 19 nt, Artificial Sequence
  Description of Artificial Sequence: Synthetic oligonucleotide
  Antisense strand to SEQ ID NO: 2577250
gauacacugauaauggucu

SEQ ID NO: 2577252 - RNA, 19 nt, Artificial Sequence
  Description of Artificial Sequence: Synthetic oligonucleotide
  Sense strand starting at position 925 of SEQ ID NO: 1889070
ccauuaucaguguauccau

SEQ ID NO: 2577253 - RNA, 19 nt, Artificial Sequence
  Description of Artificial Sequence: Synthetic oligonucleotide
  Antisense strand to SEQ ID NO: 2577252
auggauacacugauaaugg

SEQ ID NO: 2577254 - RNA, 19 nt, Artificial Sequence
  Description of Artificial Sequence: Synthetic oligonucleotide
  Sense strand starting at position 928 of SEQ ID NO: 1889070
uuaucaguguauccauacu

SEQ ID NO: 2577255 - RNA, 19 nt, Artificial Sequence
  Description of Artificial Sequence: Synthetic oligonucleotide
  Antisense strand to SEQ ID NO: 2577254
aguauggauacacugauaa

SEQ ID NO: 2577256 - RNA, 19 nt, Artificial Sequence
  Description of Artificial Sequence: Synthetic oligonucleotide
  Sense strand starting at position 1065 of SEQ ID NO: 1889070
auauguugaucguccucau

SEQ ID NO: 2577257 - RNA, 19 nt, Artificial Sequence
  Description of Artificial Sequence: Synthetic oligonucleotide
  Antisense strand to SEQ ID NO: 2577256
augaggacgaucaacauau

SEQ ID NO: 2577258 - RNA, 19 nt, Artificial Sequence
  Description of Artificial Sequence: Synthetic oligonucleotide
  Sense strand starting at position 1068 of SEQ ID NO: 1889070
uguugaucguccucaucaa

SEQ ID NO: 2577259 - RNA, 19 nt, Artificial Sequence
  Description of Artificial Sequence: Synthetic oligonucleotide
  Antisense strand to SEQ ID NO: 2577258
uugaugaggacgaucaaca

SEQ ID NO: 2577260 - RNA, 19 nt, Artificial Sequence
  Description of Artificial Sequence: Synthetic oligonucleotide
  Sense strand starting at position 1069 of SEQ ID NO: 1889070
guugaucguccucaucaac

SEQ ID NO: 2577261 - RNA, 19 nt, Artificial Sequence
  Description of Artificial Sequence: Synthetic oligonucleotide
  Antisense strand to SEQ ID NO: 2577260
guugaugaggacgaucaac

SEQ ID NO: 2577262 - RNA, 19 nt, Artificial Sequence
  Description of Artificial Sequence: Synthetic oligonucleotide
  Sense strand starting at position 1253 of SEQ ID NO: 1889070
ugaaucgaaugcuugcaaa

SEQ ID NO: 2577263 - RNA, 19 nt, Artificial Sequence
  Description of Artificial Sequence: Synthetic oligonucleotide
  Antisense strand to SEQ ID NO: 2577262
uuugcaagcauucgauuca

SEQ ID NO: 2577264 - RNA, 19 nt, Artificial Sequence
  Description of Artificial Sequence: Synthetic oligonucleotide
  Sense strand starting at position 1376 of SEQ ID NO: 1889070
ggagacaaguaggaaauua

SEQ ID NO: 2577265 - RNA, 19 nt, Artificial Sequence
  Description of Artificial Sequence: Synthetic oligonucleotide
  Antisense strand to SEQ ID NO: 2577264
uaauuuccuacuugucucc

SEQ ID NO: 2577266 - RNA, 19 nt, Artificial Sequence
  Description of Artificial Sequence: Synthetic oligonucleotide
  Sense strand starting at position 1527 of SEQ ID NO: 1889070
uugagaauuugcuacacag

SEQ ID NO: 2577267 - RNA, 19 nt, Artificial Sequence
  Description of Artificial Sequence: Synthetic oligonucleotide
  Antisense strand to SEQ ID NO: 2577266
cuguguagcaaauucucaa

SEQ ID NO: 2577268 - RNA, 19 nt, Artificial Sequence
  Description of Artificial Sequence: Synthetic oligonucleotide
  Sense strand starting at position 1791 of SEQ ID NO: 1889070
aguuauggccgugacgaga

SEQ ID NO: 2577269 - RNA, 19 nt, Artificial Sequence
  Description of Artificial Sequence: Synthetic oligonucleotide
  Antisense strand to SEQ ID NO: 2577268
ucucgucacggccauaacu

SEQ ID NO: 2577270 - RNA, 19 nt, Artificial Sequence
  Description of Artificial Sequence: Synthetic oligonucleotide
  Sense strand starting at position 1861 of SEQ ID NO: 1889070
gccuucucacucugaguca

SEQ ID NO: 2577271 - RNA, 19 nt, Artificial Sequence
  Description of Artificial Sequence: Synthetic oligonucleotide
  Antisense strand to SEQ ID NO: 2577270
ugacucagagugagaaggc

SEQ ID NO: 2577272 - RNA, 19 nt, Artificial Sequence
  Description of Artificial Sequence: Synthetic oligonucleotide
  Sense strand starting at position 2793 of SEQ ID NO: 1889070
ggaggacugaucugcagac

SEQ ID NO: 2577273 - RNA, 19 nt, Artificial Sequence
  Description of Artificial Sequence: Synthetic oligonucleotide
  Antisense strand to SEQ ID NO: 2577272
gucugcagaucaguccucc

SEQ ID NO: 2577274 - RNA, 19 nt, Artificial Sequence
  Description of Artificial Sequence: Synthetic oligonucleotide
  Sense strand starting at position 2821 of SEQ ID NO: 1889070
aagucauagucagcacgaa

SEQ ID NO: 2577275 - RNA, 19 nt, Artificial Sequence
  Description of Artificial Sequence: Synthetic oligonucleotide
  Antisense strand to SEQ ID NO: 2577274
uucgugcugacuaugacuu

SEQ ID NO: 2577276 - RNA, 19 nt, Artificial Sequence
  Description of Artificial Sequence: Synthetic oligonucleotide
  Sense strand starting at position 2822 of SEQ ID NO: 1889070
agucauagucagcacgaaa

SEQ ID NO: 2577277 - RNA, 19 nt, Artificial Sequence
  Description of Artificial Sequence: Synthetic oligonucleotide
  Antisense strand to SEQ ID NO: 2577276
uuucgugcugacuaugacu

SEQ ID NO: 2577278 - RNA, 19 nt, Artificial Sequence
  Description of Artificial Sequence: Synthetic oligonucleotide
  Sense strand starting at position 2825 of SEQ ID NO: 1889070
cauagucagcacgaaagaa

SEQ ID NO: 2577279 - RNA, 19 nt, Artificial Sequence
  Description of Artificial Sequence: Synthetic oligonucleotide
  Antisense strand to SEQ ID NO: 2577278
uucuuucgugcugacuaug

SEQ ID NO: 2577280 - RNA, 19 nt, Artificial Sequence
  Description of Artificial Sequence: Synthetic oligonucleotide
  Sense strand starting at position 3363 of SEQ ID NO: 1889070
uuuagauaguggucucacu

SEQ ID NO: 2577281 - RNA, 19 nt, Artificial Sequence
  Description of Artificial Sequence: Synthetic oligonucleotide
  Antisense strand to SEQ ID NO: 2577280
agugagaccacuaucuaaa

SEQ ID NO: 2577282 - RNA, 19 nt, Artificial Sequence
  Description of Artificial Sequence: Synthetic oligonucleotide
  Sense strand starting at position 3491 of SEQ ID NO: 1889070
ccaugcuuccaauaaacgu

SEQ ID NO: 2577283 - RNA, 19 nt, Artificial Sequence
  Description of Artificial Sequence: Synthetic oligonucleotide
  Antisense strand to SEQ ID NO: 2577282
acguuuauuggaagcaugg

SEQ ID NO: 2577284 - RNA, 19 nt, Artificial Sequence
  Description of Artificial Sequence: Synthetic oligonucleotide
  Sense strand starting at position 3513 of SEQ ID NO: 1889070
ugaauaaauucuucuguag

SEQ ID NO: 2577285 - RNA, 19 nt, Artificial Sequence
  Description of Artificial Sequence: Synthetic oligonucleotide
  Antisense strand to SEQ ID NO: 2577284
cuacagaagaauuuauuca

SEQ ID NO: 2577286 - RNA, 19 nt, Artificial Sequence
  Description of Artificial Sequence: Synthetic oligonucleotide
  Sense strand starting at position 3618 of SEQ ID NO: 1889070
ugaauauaccuguagguca

SEQ ID NO: 2577287 - RNA, 19 nt, Artificial Sequence
  Description of Artificial Sequence: Synthetic oligonucleotide
  Antisense strand to SEQ ID NO: 2577286
ugaccuacagguauauuca

SEQ ID NO: 2577288 - RNA, 19 nt, Artificial Sequence
  Description of Artificial Sequence: Synthetic oligonucleotide
  Sense strand starting at position 3681 of SEQ ID NO: 1889070
aggcucuaggcucaguuau

SEQ ID NO: 2577289 - RNA, 19 nt, Artificial Sequence
  Description of Artificial Sequence: Synthetic oligonucleotide
  Antisense strand to SEQ ID NO: 2577288
auaacugagccuagagccu

SEQ ID NO: 2577290 - RNA, 19 nt, Artificial Sequence
  Description of Artificial Sequence: Synthetic oligonucleotide
  Sense strand starting at position 3746 of SEQ ID NO: 1889070
guguauugaccugaucccu

SEQ ID NO: 2577291 - RNA, 19 nt, Artificial Sequence
  Description of Artificial Sequence: Synthetic oligonucleotide
  Antisense strand to SEQ ID NO: 2577290
agggaucaggucaauacac

SEQ ID NO: 2577292 - RNA, 19 nt, Artificial Sequence
  Description of Artificial Sequence: Synthetic oligonucleotide
  Sense strand starting at position 3752 of SEQ ID NO: 1889070
ugaccugaucccugggaca

SEQ ID NO: 2577293 - RNA, 19 nt, Artificial Sequence
  Description of Artificial Sequence: Synthetic oligonucleotide
  Antisense strand to SEQ ID NO: 2577292
ugucccagggaucagguca

SEQ ID NO: 2577294 - RNA, 19 nt, Artificial Sequence
  Description of Artificial Sequence: Synthetic oligonucleotide
  Sense strand starting at position 3765 of SEQ ID NO: 1889070
gggacaaguuucccagacu

SEQ ID NO: 2577295 - RNA, 19 nt, Artificial Sequence
  Description of Artificial Sequence: Synthetic oligonucleotide
  Antisense strand to SEQ ID NO: 2577294
agucugggaaacuuguccc

SEQ ID NO: 2577296 - RNA, 19 nt, Artificial Sequence
  Description of Artificial Sequence: Synthetic oligonucleotide
  Sense strand starting at position 3780 of SEQ ID NO: 1889070
gacugaaaucaugguauca

SEQ ID NO: 2577297 - RNA, 19 nt, Artificial Sequence
  Description of Artificial Sequence: Synthetic oligonucleotide
  Antisense strand to SEQ ID NO: 2577296
ugauaccaugauuucaguc

SEQ ID NO: 2577298 - RNA, 19 nt, Artificial Sequence
  Description of Artificial Sequence: Synthetic oligonucleotide
  Sense strand starting at position 3844 of SEQ ID NO: 1889070
ucaauccguguguaaauaa

SEQ ID NO: 2577299 - RNA, 19 nt, Artificial Sequence
  Description of Artificial Sequence: Synthetic oligonucleotide
  Antisense strand to SEQ ID NO: 2577298
uuauuuacacacggauuga

SEQ ID NO: 2577300 - RNA, 19 nt, Artificial Sequence
  Description of Artificial Sequence: Synthetic oligonucleotide
  Sense strand starting at position 3881 of SEQ ID NO: 1889070
agauguaugcaauaaugca

SEQ ID NO: 2577301 - RNA, 19 nt, Artificial Sequence
  Description of Artificial Sequence: Synthetic oligonucleotide
  Antisense strand to SEQ ID NO: 2577300
ugcauuauugcauacaucu

SEQ ID NO: 2577302 - RNA, 19 nt, Artificial Sequence
  Description of Artificial Sequence: Synthetic oligonucleotide
  Sense strand starting at position 3950 of SEQ ID NO: 1889070
aacagaucugaucguaauu

SEQ ID NO: 2577303 - RNA, 19 nt, Artificial Sequence
  Description of Artificial Sequence: Synthetic oligonucleotide
  Antisense strand to SEQ ID NO: 2577302
aauuacgaucagaucuguu

SEQ ID NO: 2577304 - RNA, 19 nt, Artificial Sequence
  Description of Artificial Sequence: Synthetic oligonucleotide
  Sense strand starting at position 291 of SEQ ID NO: 1889071
gccaacuuugagcaaaugu

SEQ ID NO: 2577305 - RNA, 19 nt, Artificial Sequence
  Description of Artificial Sequence: Synthetic oligonucleotide
  Antisense strand to SEQ ID NO: 2577304
acauuugcucaaaguuggc

SEQ ID NO: 2577306 - RNA, 19 nt, Artificial Sequence
  Description of Artificial Sequence: Synthetic oligonucleotide
  Sense strand starting at position 298 of SEQ ID NO: 1889071
uugagcaaauguuugguau

SEQ ID NO: 2577307 - RNA, 19 nt, Artificial Sequence
  Description of Artificial Sequence: Synthetic oligonucleotide
  Antisense strand to SEQ ID NO: 2577306
auaccaaacauuugcucaa

SEQ ID NO: 2577308 - RNA, 19 nt, Artificial Sequence
  Description of Artificial Sequence: Synthetic oligonucleotide
  Sense strand starting at position 299 of SEQ ID NO: 1889071
ugagcaaauguuugguauc

SEQ ID NO: 2577309 - RNA, 19 nt, Artificial Sequence
  Description of Artificial Sequence: Synthetic oligonucleotide
  Antisense strand to SEQ ID NO: 2577308
gauaccaaacauuugcuca

SEQ ID NO: 2577310 - RNA, 19 nt, Artificial Sequence
  Description of Artificial Sequence: Synthetic oligonucleotide
  Sense strand starting at position 301 of SEQ ID NO: 1889071
agcaaauguuugguaucuu

SEQ ID NO: 2577311 - RNA, 19 nt, Artificial Sequence
  Description of Artificial Sequence: Synthetic oligonucleotide
  Antisense strand to SEQ ID NO: 2577310
aagauaccaaacauuugcu

SEQ ID NO: 2577312 - RNA, 19 nt, Artificial Sequence
  Description of Artificial Sequence: Synthetic oligonucleotide
  Sense strand starting at position 328 of SEQ ID NO: 1889071
guucucuuugcuccuguua

SEQ ID NO: 2577313 - RNA, 19 nt, Artificial Sequence
  Description of Artificial Sequence: Synthetic oligonucleotide
  Antisense strand to SEQ ID NO: 2577312
uaacaggagcaaagagaac

SEQ ID NO: 2577314 - RNA, 19 nt, Artificial Sequence
  Description of Artificial Sequence: Synthetic oligonucleotide
  Sense strand starting at position 620 of SEQ ID NO: 1889071
agguaugucuuauuauaag

SEQ ID NO: 2577315 - RNA, 19 nt, Artificial Sequence
  Description of Artificial Sequence: Synthetic oligonucleotide
  Antisense strand to SEQ ID NO: 2577314
cuuauaauaagacauaccu

SEQ ID NO: 2577316 - RNA, 19 nt, Artificial Sequence
  Description of Artificial Sequence: Synthetic oligonucleotide
  Sense strand starting at position 632 of SEQ ID NO: 1889071
uuauaaguaugucuagaga

SEQ ID NO: 2577317 - RNA, 19 nt, Artificial Sequence
  Description of Artificial Sequence: Synthetic oligonucleotide
  Antisense strand to SEQ ID NO: 2577316
ucucuagacauacuuauaa

SEQ ID NO: 2577318 - RNA, 19 nt, Artificial Sequence
  Description of Artificial Sequence: Synthetic oligonucleotide
  Sense strand starting at position 724 of SEQ ID NO: 1889071
agauauccucagggacuuu

SEQ ID NO: 2577319 - RNA, 19 nt, Artificial Sequence
  Description of Artificial Sequence: Synthetic oligonucleotide
  Antisense strand to SEQ ID NO: 2577318
aaagucccugaggauaucu

SEQ ID NO: 2577320 - RNA, 19 nt, Artificial Sequence
  Description of Artificial Sequence: Synthetic oligonucleotide
  Sense strand starting at position 753 of SEQ ID NO: 1889071
uuaaucaauguugggauga

SEQ ID NO: 2577321 - RNA, 19 nt, Artificial Sequence
  Description of Artificial Sequence: Synthetic oligonucleotide
  Antisense strand to SEQ ID NO: 2577320
ucaucccaacauugauuaa

SEQ ID NO: 2577322 - RNA, 19 nt, Artificial Sequence
  Description of Artificial Sequence: Synthetic oligonucleotide
  Sense strand starting at position 763 of SEQ ID NO: 1889071
uugggaugaauguguguaa

SEQ ID NO: 2577323 - RNA, 19 nt, Artificial Sequence
  Description of Artificial Sequence: Synthetic oligonucleotide
  Antisense strand to SEQ ID NO: 2577322
uuacacacauucaucccaa

SEQ ID NO: 2577324 - RNA, 19 nt, Artificial Sequence
  Description of Artificial Sequence: Synthetic oligonucleotide
  Sense strand starting at position 764 of SEQ ID NO: 1889071
ugggaugaauguguguaau

SEQ ID NO: 2577325 - RNA, 19 nt, Artificial Sequence
  Description of Artificial Sequence: Synthetic oligonucleotide
  Antisense strand to SEQ ID NO: 2577324
auuacacacauucauccca

SEQ ID NO: 2577326 - RNA, 19 nt, Artificial Sequence
  Description of Artificial Sequence: Synthetic oligonucleotide
  Sense strand starting at position 766 of SEQ ID NO: 1889071
ggaugaauguguguaaucu

SEQ ID NO: 2577327 - RNA, 19 nt, Artificial Sequence
  Description of Artificial Sequence: Synthetic oligonucleotide
  Antisense strand to SEQ ID NO: 2577326
agauuacacacauucaucc

SEQ ID NO: 2577328 - RNA, 19 nt, Artificial Sequence
  Description of Artificial Sequence: Synthetic oligonucleotide
  Sense strand starting at position 767 of SEQ ID NO: 1889071
gaugaauguguguaaucug

SEQ ID NO: 2577329 - RNA, 19 nt, Artificial Sequence
  Description of Artificial Sequence: Synthetic oligonucleotide
  Antisense strand to SEQ ID NO: 2577328
cagauuacacacauucauc

SEQ ID NO: 2577330 - RNA, 19 nt, Artificial Sequence
  Description of Artificial Sequence: Synthetic oligonucleotide
  Sense strand starting at position 775 of SEQ ID NO: 1889071
uguguaaucuguucugaau

SEQ ID NO: 2577331 - RNA, 19 nt, Artificial Sequence
  Description of Artificial Sequence: Synthetic oligonucleotide
  Antisense strand to SEQ ID NO: 2577330
auucagaacagauuacaca

SEQ ID NO: 2577332 - RNA, 19 nt, Artificial Sequence
  Description of Artificial Sequence: Synthetic oligonucleotide
  Sense strand starting at position 781 of SEQ ID NO: 1889071
aucuguucugaauaagcau

SEQ ID NO: 2577333 - RNA, 19 nt, Artificial Sequence
  Description of Artificial Sequence: Synthetic oligonucleotide
  Antisense strand to SEQ ID NO: 2577332
augcuuauucagaacagau

SEQ ID NO: 2577334 - RNA, 19 nt, Artificial Sequence
  Description of Artificial Sequence: Synthetic oligonucleotide
  Sense strand starting at position 920 of SEQ ID NO: 1889071
gggagaccauuaucagugu

SEQ ID NO: 2577335 - RNA, 19 nt, Artificial Sequence
  Description of Artificial Sequence: Synthetic oligonucleotide
  Antisense strand to SEQ ID NO: 2577334
acacugauaauggucuccc

SEQ ID NO: 2577336 - RNA, 19 nt, Artificial Sequence
  Description of Artificial Sequence: Synthetic oligonucleotide
  Sense strand starting at position 923 of SEQ ID NO: 1889071
agaccauuaucaguguauc

SEQ ID NO: 2577337 - RNA, 19 nt, Artificial Sequence
  Description of Artificial Sequence: Synthetic oligonucleotide
  Antisense strand to SEQ ID NO: 2577336
gauacacugauaauggucu

SEQ ID NO: 2577338 - RNA, 19 nt, Artificial Sequence
  Description of Artificial Sequence: Synthetic oligonucleotide
  Sense strand starting at position 926 of SEQ ID NO: 1889071
ccauuaucaguguauccau

SEQ ID NO: 2577339 - RNA, 19 nt, Artificial Sequence
  Description of Artificial Sequence: Synthetic oligonucleotide
  Antisense strand to SEQ ID NO: 2577338
auggauacacugauaaugg

SEQ ID NO: 2577340 - RNA, 19 nt, Artificial Sequence
  Description of Artificial Sequence: Synthetic oligonucleotide
  Sense strand starting at position 929 of SEQ ID NO: 1889071
uuaucaguguauccauacu

SEQ ID NO: 2577341 - RNA, 19 nt, Artificial Sequence
  Description of Artificial Sequence: Synthetic oligonucleotide
  Antisense strand to SEQ ID NO: 2577340
aguauggauacacugauaa

SEQ ID NO: 2577342 - RNA, 19 nt, Artificial Sequence
  Description of Artificial Sequence: Synthetic oligonucleotide
  Sense strand starting at position 1066 of SEQ ID NO: 1889071
auauguugaucguccucau

SEQ ID NO: 2577343 - RNA, 19 nt, Artificial Sequence
  Description of Artificial Sequence: Synthetic oligonucleotide
  Antisense strand to SEQ ID NO: 2577342
augaggacgaucaacauau

SEQ ID NO: 2577344 - RNA, 19 nt, Artificial Sequence
  Description of Artificial Sequence: Synthetic oligonucleotide
  Sense strand starting at position 1069 of SEQ ID NO: 1889071
uguugaucguccucaucaa

SEQ ID NO: 2577345 - RNA, 19 nt, Artificial Sequence
  Description of Artificial Sequence: Synthetic oligonucleotide
  Antisense strand to SEQ ID NO: 2577344
uugaugaggacgaucaaca

SEQ ID NO: 2577346 - RNA, 19 nt, Artificial Sequence
  Description of Artificial Sequence: Synthetic oligonucleotide
  Sense strand starting at position 1070 of SEQ ID NO: 1889071
guugaucguccucaucaac

SEQ ID NO: 2577347 - RNA, 19 nt, Artificial Sequence
  Description of Artificial Sequence: Synthetic oligonucleotide
  Antisense strand to SEQ ID NO: 2577346
guugaugaggacgaucaac

SEQ ID NO: 2577348 - RNA, 19 nt, Artificial Sequence
  Description of Artificial Sequence: Synthetic oligonucleotide
  Sense strand starting at position 1110 of SEQ ID NO: 1889071
gaauacugcgauugggaaa

SEQ ID NO: 2577349 - RNA, 19 nt, Artificial Sequence
  Description of Artificial Sequence: Synthetic oligonucleotide
  Antisense strand to SEQ ID NO: 2577348
uuucccaaucgcaguauuc

SEQ ID NO: 2577350 - RNA, 19 nt, Artificial Sequence
  Description of Artificial Sequence: Synthetic oligonucleotide
  Sense strand starting at position 1377 of SEQ ID NO: 1889071
ggagacaaguaggaaauua

SEQ ID NO: 2577351 - RNA, 19 nt, Artificial Sequence
  Description of Artificial Sequence: Synthetic oligonucleotide
  Antisense strand to SEQ ID NO: 2577350
uaauuuccuacuugucucc

SEQ ID NO: 2577352 - RNA, 19 nt, Artificial Sequence
  Description of Artificial Sequence: Synthetic oligonucleotide
  Sense strand starting at position 1528 of SEQ ID NO: 1889071
uugagaauuugcuacacag

SEQ ID NO: 2577353 - RNA, 19 nt, Artificial Sequence
  Description of Artificial Sequence: Synthetic oligonucleotide
  Antisense strand to SEQ ID NO: 2577352
cuguguagcaaauucucaa

SEQ ID NO: 2577354 - RNA, 19 nt, Artificial Sequence
  Description of Artificial Sequence: Synthetic oligonucleotide
  Sense strand starting at position 2822 of SEQ ID NO: 1889071
aagucauagucagcacgaa

SEQ ID NO: 2577355 - RNA, 19 nt, Artificial Sequence
  Description of Artificial Sequence: Synthetic oligonucleotide
  Antisense strand to SEQ ID NO: 2577354
uucgugcugacuaugacuu

SEQ ID NO: 2577356 - RNA, 19 nt, Artificial Sequence
  Description of Artificial Sequence: Synthetic oligonucleotide
  Sense strand starting at position 2823 of SEQ ID NO: 1889071
agucauagucagcacgaaa

SEQ ID NO: 2577357 - RNA, 19 nt, Artificial Sequence
  Description of Artificial Sequence: Synthetic oligonucleotide
  Antisense strand to SEQ ID NO: 2577356
uuucgugcugacuaugacu

SEQ ID NO: 2577358 - RNA, 19 nt, Artificial Sequence
  Description of Artificial Sequence: Synthetic oligonucleotide
  Sense strand starting at position 2826 of SEQ ID NO: 1889071
cauagucagcacgaaagaa

SEQ ID NO: 2577359 - RNA, 19 nt, Artificial Sequence
  Description of Artificial Sequence: Synthetic oligonucleotide
  Antisense strand to SEQ ID NO: 2577358
uucuuucgugcugacuaug

SEQ ID NO: 2577360 - RNA, 19 nt, Artificial Sequence
  Description of Artificial Sequence: Synthetic oligonucleotide
  Sense strand starting at position 3364 of SEQ ID NO: 1889071
uuuagauaguggucucacu

SEQ ID NO: 2577361 - RNA, 19 nt, Artificial Sequence
  Description of Artificial Sequence: Synthetic oligonucleotide
  Antisense strand to SEQ ID NO: 2577360
agugagaccacuaucuaaa

SEQ ID NO: 2577362 - RNA, 19 nt, Artificial Sequence
  Description of Artificial Sequence: Synthetic oligonucleotide
  Sense strand starting at position 3492 of SEQ ID NO: 1889071
ccaugcuuccaauaaacgu

SEQ ID NO: 2577363 - RNA, 19 nt, Artificial Sequence
  Description of Artificial Sequence: Synthetic oligonucleotide
  Antisense strand to SEQ ID NO: 2577362
acguuuauuggaagcaugg

SEQ ID NO: 2577364 - RNA, 19 nt, Artificial Sequence
  Description of Artificial Sequence: Synthetic oligonucleotide
  Sense strand starting at position 3514 of SEQ ID NO: 1889071
ugaauaaauucuucuguag

SEQ ID NO: 2577365 - RNA, 19 nt, Artificial Sequence
  Description of Artificial Sequence: Synthetic oligonucleotide
  Antisense strand to SEQ ID NO: 2577364
cuacagaagaauuuauuca

SEQ ID NO: 2577366 - RNA, 19 nt, Artificial Sequence
  Description of Artificial Sequence: Synthetic oligonucleotide
  Sense strand starting at position 3682 of SEQ ID NO: 1889071
aggcucuaggcucaguuau

SEQ ID NO: 2577367 - RNA, 19 nt, Artificial Sequence
  Description of Artificial Sequence: Synthetic oligonucleotide
  Antisense strand to SEQ ID NO: 2577366
auaacugagccuagagccu

SEQ ID NO: 2577368 - RNA, 19 nt, Artificial Sequence
  Description of Artificial Sequence: Synthetic oligonucleotide
  Sense strand starting at position 3684 of SEQ ID NO: 1889071
gcucuaggcucaguuauga

SEQ ID NO: 2577369 - RNA, 19 nt, Artificial Sequence
  Description of Artificial Sequence: Synthetic oligonucleotide
  Antisense strand to SEQ ID NO: 2577368
ucauaacugagccuagagc

SEQ ID NO: 2577370 - RNA, 19 nt, Artificial Sequence
  Description of Artificial Sequence: Synthetic oligonucleotide
  Sense strand starting at position 3733 of SEQ ID NO: 1889071
ucaaauguauguuugugua

SEQ ID NO: 2577371 - RNA, 19 nt, Artificial Sequence
  Description of Artificial Sequence: Synthetic oligonucleotide
  Antisense strand to SEQ ID NO: 2577370
uacacaaacauacauuuga

SEQ ID NO: 2577372 - RNA, 19 nt, Artificial Sequence
  Description of Artificial Sequence: Synthetic oligonucleotide
  Sense strand starting at position 3747 of SEQ ID NO: 1889071
guguauugaccugaucccu

SEQ ID NO: 2577373 - RNA, 19 nt, Artificial Sequence
  Description of Artificial Sequence: Synthetic oligonucleotide
  Antisense strand to SEQ ID NO: 2577372
agggaucaggucaauacac

SEQ ID NO: 2577374 - RNA, 19 nt, Artificial Sequence
  Description of Artificial Sequence: Synthetic oligonucleotide
  Sense strand starting at position 3753 of SEQ ID NO: 1889071
ugaccugaucccugggaca

SEQ ID NO: 2577375 - RNA, 19 nt, Artificial Sequence
  Description of Artificial Sequence: Synthetic oligonucleotide
  Antisense strand to SEQ ID NO: 2577374
ugucccagggaucagguca

SEQ ID NO: 2577376 - RNA, 19 nt, Artificial Sequence
  Description of Artificial Sequence: Synthetic oligonucleotide
  Sense strand starting at position 3781 of SEQ ID NO: 1889071
gacugaaaucaugguauca

SEQ ID NO: 2577377 - RNA, 19 nt, Artificial Sequence
  Description of Artificial Sequence: Synthetic oligonucleotide
  Antisense strand to SEQ ID NO: 2577376
ugauaccaugauuucaguc

SEQ ID NO: 2577378 - RNA, 19 nt, Artificial Sequence
  Description of Artificial Sequence: Synthetic oligonucleotide
  Sense strand starting at position 3845 of SEQ ID NO: 1889071
ucaauccguguguaaauaa

SEQ ID NO: 2577379 - RNA, 19 nt, Artificial Sequence
  Description of Artificial Sequence: Synthetic oligonucleotide
  Antisense strand to SEQ ID NO: 2577378
uuauuuacacacggauuga

SEQ ID NO: 2577380 - RNA, 19 nt, Artificial Sequence
  Description of Artificial Sequence: Synthetic oligonucleotide
  Sense strand starting at position 3882 of SEQ ID NO: 1889071
agauguaugcaauaaugca

SEQ ID NO: 2577381 - RNA, 19 nt, Artificial Sequence
  Description of Artificial Sequence: Synthetic oligonucleotide
  Antisense strand to SEQ ID NO: 2577380
ugcauuauugcauacaucu

SEQ ID NO: 2577382 - RNA, 19 nt, Artificial Sequence
  Description of Artificial Sequence: Synthetic oligonucleotide
  Sense strand starting at position 3951 of SEQ ID NO: 1889071
aacagaucugaucguaauu

SEQ ID NO: 2577383 - RNA, 19 nt, Artificial Sequence
  Description of Artificial Sequence: Synthetic oligonucleotide
  Antisense strand to SEQ ID NO: 2577382
aauuacgaucagaucuguu

SEQ ID NO: 2577384 - RNA, 19 nt, Artificial Sequence
  Description of Artificial Sequence: Synthetic oligonucleotide
  Sense strand starting at position 112 of SEQ ID NO: 1889072
agaugagccucugccacau

SEQ ID NO: 2577385 - RNA, 19 nt, Artificial Sequence
  Description of Artificial Sequence: Synthetic oligonucleotide
  Antisense strand to SEQ ID NO: 2577384
auguggcagaggcucaucu

SEQ ID NO: 2577386 - RNA, 19 nt, Artificial Sequence
  Description of Artificial Sequence: Synthetic oligonucleotide
  Sense strand starting at position 290 of SEQ ID NO: 1889072
gccaacuuugagcaaaugu

SEQ ID NO: 2577387 - RNA, 19 nt, Artificial Sequence
  Description of Artificial Sequence: Synthetic oligonucleotide
  Antisense strand to SEQ ID NO: 2577386
acauuugcucaaaguuggc

SEQ ID NO: 2577388 - RNA, 19 nt, Artificial Sequence
  Description of Artificial Sequence: Synthetic oligonucleotide
  Sense strand starting at position 297 of SEQ ID NO: 1889072
uugagcaaauguuugguau

SEQ ID NO: 2577389 - RNA, 19 nt, Artificial Sequence
  Description of Artificial Sequence: Synthetic oligonucleotide
  Antisense strand to SEQ ID NO: 2577388
auaccaaacauuugcucaa

SEQ ID NO: 2577390 - RNA, 19 nt, Artificial Sequence
  Description of Artificial Sequence: Synthetic oligonucleotide
  Sense strand starting at position 298 of SEQ ID NO: 1889072
ugagcaaauguuugguauc

SEQ ID NO: 2577391 - RNA, 19 nt, Artificial Sequence
  Description of Artificial Sequence: Synthetic oligonucleotide
  Antisense strand to SEQ ID NO: 2577390
gauaccaaacauuugcuca

SEQ ID NO: 2577392 - RNA, 19 nt, Artificial Sequence
  Description of Artificial Sequence: Synthetic oligonucleotide
  Sense strand starting at position 300 of SEQ ID NO: 1889072
agcaaauguuugguaucuu

SEQ ID NO: 2577393 - RNA, 19 nt, Artificial Sequence
  Description of Artificial Sequence: Synthetic oligonucleotide
  Antisense strand to SEQ ID NO: 2577392
aagauaccaaacauuugcu

SEQ ID NO: 2577394 - RNA, 19 nt, Artificial Sequence
  Description of Artificial Sequence: Synthetic oligonucleotide
  Sense strand starting at position 327 of SEQ ID NO: 1889072
guucucuuugcuccuguua

SEQ ID NO: 2577395 - RNA, 19 nt, Artificial Sequence
  Description of Artificial Sequence: Synthetic oligonucleotide
  Antisense strand to SEQ ID NO: 2577394
uaacaggagcaaagagaac

SEQ ID NO: 2577396 - RNA, 19 nt, Artificial Sequence
  Description of Artificial Sequence: Synthetic oligonucleotide
  Sense strand starting at position 619 of SEQ ID NO: 1889072
agguaugucuuauuauaag

SEQ ID NO: 2577397 - RNA, 19 nt, Artificial Sequence
  Description of Artificial Sequence: Synthetic oligonucleotide
  Antisense strand to SEQ ID NO: 2577396
cuuauaauaagacauaccu

SEQ ID NO: 2577398 - RNA, 19 nt, Artificial Sequence
  Description of Artificial Sequence: Synthetic oligonucleotide
  Sense strand starting at position 631 of SEQ ID NO: 1889072
uuauaaguaugucuagaga

SEQ ID NO: 2577399 - RNA, 19 nt, Artificial Sequence
  Description of Artificial Sequence: Synthetic oligonucleotide
  Antisense strand to SEQ ID NO: 2577398
ucucuagacauacuuauaa

SEQ ID NO: 2577400 - RNA, 19 nt, Artificial Sequence
  Description of Artificial Sequence: Synthetic oligonucleotide
  Sense strand starting at position 723 of SEQ ID NO: 1889072
agauauccucagggacuuu

SEQ ID NO: 2577401 - RNA, 19 nt, Artificial Sequence
  Description of Artificial Sequence: Synthetic oligonucleotide
  Antisense strand to SEQ ID NO: 2577400
aaagucccugaggauaucu

SEQ ID NO: 2577402 - RNA, 19 nt, Artificial Sequence
  Description of Artificial Sequence: Synthetic oligonucleotide
  Sense strand starting at position 752 of SEQ ID NO: 1889072
uuaaucaauguugggauga

SEQ ID NO: 2577403 - RNA, 19 nt, Artificial Sequence
  Description of Artificial Sequence: Synthetic oligonucleotide
  Antisense strand to SEQ ID NO: 2577402
ucaucccaacauugauuaa

SEQ ID NO: 2577404 - RNA, 19 nt, Artificial Sequence
  Description of Artificial Sequence: Synthetic oligonucleotide
  Sense strand starting at position 766 of SEQ ID NO: 1889072
gaugaauguguguaaucug

SEQ ID NO: 2577405 - RNA, 19 nt, Artificial Sequence
  Description of Artificial Sequence: Synthetic oligonucleotide
  Antisense strand to SEQ ID NO: 2577404
cagauuacacacauucauc

SEQ ID NO: 2577406 - RNA, 19 nt, Artificial Sequence
  Description of Artificial Sequence: Synthetic oligonucleotide
  Sense strand starting at position 774 of SEQ ID NO: 1889072
uguguaaucuguucugaau

SEQ ID NO: 2577407 - RNA, 19 nt, Artificial Sequence
  Description of Artificial Sequence: Synthetic oligonucleotide
  Antisense strand to SEQ ID NO: 2577406
auucagaacagauuacaca

SEQ ID NO: 2577408 - RNA, 19 nt, Artificial Sequence
  Description of Artificial Sequence: Synthetic oligonucleotide
  Sense strand starting at position 780 of SEQ ID NO: 1889072
aucuguucugaauaagcau

SEQ ID NO: 2577409 - RNA, 19 nt, Artificial Sequence
  Description of Artificial Sequence: Synthetic oligonucleotide
  Antisense strand to SEQ ID NO: 2577408
augcuuauucagaacagau

SEQ ID NO: 2577410 - RNA, 19 nt, Artificial Sequence
  Description of Artificial Sequence: Synthetic oligonucleotide
  Sense strand starting at position 922 of SEQ ID NO: 1889072
agaccauuaucaguguauc

SEQ ID NO: 2577411 - RNA, 19 nt, Artificial Sequence
  Description of Artificial Sequence: Synthetic oligonucleotide
  Antisense strand to SEQ ID NO: 2577410
gauacacugauaauggucu

SEQ ID NO: 2577412 - RNA, 19 nt, Artificial Sequence
  Description of Artificial Sequence: Synthetic oligonucleotide
  Sense strand starting at position 925 of SEQ ID NO: 1889072
ccauuaucaguguauccau

SEQ ID NO: 2577413 - RNA, 19 nt, Artificial Sequence
  Description of Artificial Sequence: Synthetic oligonucleotide
  Antisense strand to SEQ ID NO: 2577412
auggauacacugauaaugg

SEQ ID NO: 2577414 - RNA, 19 nt, Artificial Sequence
  Description of Artificial Sequence: Synthetic oligonucleotide
  Sense strand starting at position 928 of SEQ ID NO: 1889072
uuaucaguguauccauacu

SEQ ID NO: 2577415 - RNA, 19 nt, Artificial Sequence
  Description of Artificial Sequence: Synthetic oligonucleotide
  Antisense strand to SEQ ID NO: 2577414
aguauggauacacugauaa

SEQ ID NO: 2577416 - RNA, 19 nt, Artificial Sequence
  Description of Artificial Sequence: Synthetic oligonucleotide
  Sense strand starting at position 1065 of SEQ ID NO: 1889072
auauguugaucguccucau

SEQ ID NO: 2577417 - RNA, 19 nt, Artificial Sequence
  Description of Artificial Sequence: Synthetic oligonucleotide
  Antisense strand to SEQ ID NO: 2577416
augaggacgaucaacauau

SEQ ID NO: 2577418 - RNA, 19 nt, Artificial Sequence
  Description of Artificial Sequence: Synthetic oligonucleotide
  Sense strand starting at position 1068 of SEQ ID NO: 1889072
uguugaucguccucaucaa

SEQ ID NO: 2577419 - RNA, 19 nt, Artificial Sequence
  Description of Artificial Sequence: Synthetic oligonucleotide
  Antisense strand to SEQ ID NO: 2577418
uugaugaggacgaucaaca

SEQ ID NO: 2577420 - RNA, 19 nt, Artificial Sequence
  Description of Artificial Sequence: Synthetic oligonucleotide
  Sense strand starting at position 1069 of SEQ ID NO: 1889072
guugaucguccucaucaac

SEQ ID NO: 2577421 - RNA, 19 nt, Artificial Sequence
  Description of Artificial Sequence: Synthetic oligonucleotide
  Antisense strand to SEQ ID NO: 2577420
guugaugaggacgaucaac

SEQ ID NO: 2577422 - RNA, 19 nt, Artificial Sequence
  Description of Artificial Sequence: Synthetic oligonucleotide
  Sense strand starting at position 1253 of SEQ ID NO: 1889072
ugaaucgaaugcuugcaaa

SEQ ID NO: 2577423 - RNA, 19 nt, Artificial Sequence
  Description of Artificial Sequence: Synthetic oligonucleotide
  Antisense strand to SEQ ID NO: 2577422
uuugcaagcauucgauuca

SEQ ID NO: 2577424 - RNA, 19 nt, Artificial Sequence
  Description of Artificial Sequence: Synthetic oligonucleotide
  Sense strand starting at position 1376 of SEQ ID NO: 1889072
ggagacaaguaggaaauua

SEQ ID NO: 2577425 - RNA, 19 nt, Artificial Sequence
  Description of Artificial Sequence: Synthetic oligonucleotide
  Antisense strand to SEQ ID NO: 2577424
uaauuuccuacuugucucc

SEQ ID NO: 2577426 - RNA, 19 nt, Artificial Sequence
  Description of Artificial Sequence: Synthetic oligonucleotide
  Sense strand starting at position 1527 of SEQ ID NO: 1889072
uugagaauuugcuacacag

SEQ ID NO: 2577427 - RNA, 19 nt, Artificial Sequence
  Description of Artificial Sequence: Synthetic oligonucleotide
  Antisense strand to SEQ ID NO: 2577426
cuguguagcaaauucucaa

SEQ ID NO: 2577428 - RNA, 19 nt, Artificial Sequence
  Description of Artificial Sequence: Synthetic oligonucleotide
  Sense strand starting at position 1791 of SEQ ID NO: 1889072
aguuauggccgugacgaga

SEQ ID NO: 2577429 - RNA, 19 nt, Artificial Sequence
  Description of Artificial Sequence: Synthetic oligonucleotide
  Antisense strand to SEQ ID NO: 2577428
ucucgucacggccauaacu

SEQ ID NO: 2577430 - RNA, 19 nt, Artificial Sequence
  Description of Artificial Sequence: Synthetic oligonucleotide
  Sense strand starting at position 1861 of SEQ ID NO: 1889072
gccuucucacucugaguca

SEQ ID NO: 2577431 - RNA, 19 nt, Artificial Sequence
  Description of Artificial Sequence: Synthetic oligonucleotide
  Antisense strand to SEQ ID NO: 2577430
ugacucagagugagaaggc

SEQ ID NO: 2577432 - RNA, 19 nt, Artificial Sequence
  Description of Artificial Sequence: Synthetic oligonucleotide
  Sense strand starting at position 2793 of SEQ ID NO: 1889072
ggaggacugaucugcagac

SEQ ID NO: 2577433 - RNA, 19 nt, Artificial Sequence
  Description of Artificial Sequence: Synthetic oligonucleotide
  Antisense strand to SEQ ID NO: 2577432
gucugcagaucaguccucc

SEQ ID NO: 2577434 - RNA, 19 nt, Artificial Sequence
  Description of Artificial Sequence: Synthetic oligonucleotide
  Sense strand starting at position 2821 of SEQ ID NO: 1889072
aagucauagucagcacgaa

SEQ ID NO: 2577435 - RNA, 19 nt, Artificial Sequence
  Description of Artificial Sequence: Synthetic oligonucleotide
  Antisense strand to SEQ ID NO: 2577434
uucgugcugacuaugacuu

SEQ ID NO: 2577436 - RNA, 19 nt, Artificial Sequence
  Description of Artificial Sequence: Synthetic oligonucleotide
  Sense strand starting at position 2822 of SEQ ID NO: 1889072
agucauagucagcacgaaa

SEQ ID NO: 2577437 - RNA, 19 nt, Artificial Sequence
  Description of Artificial Sequence: Synthetic oligonucleotide
  Antisense strand to SEQ ID NO: 2577436
uuucgugcugacuaugacu

SEQ ID NO: 2577438 - RNA, 19 nt, Artificial Sequence
  Description of Artificial Sequence: Synthetic oligonucleotide
  Sense strand starting at position 2825 of SEQ ID NO: 1889072
cauagucagcacgaaagaa

SEQ ID NO: 2577439 - RNA, 19 nt, Artificial Sequence
  Description of Artificial Sequence: Synthetic oligonucleotide
  Antisense strand to SEQ ID NO: 2577438
uucuuucgugcugacuaug

SEQ ID NO: 2577440 - RNA, 19 nt, Artificial Sequence
  Description of Artificial Sequence: Synthetic oligonucleotide
  Sense strand starting at position 3363 of SEQ ID NO: 1889072
uuuagauaguggucucacu

SEQ ID NO: 2577441 - RNA, 19 nt, Artificial Sequence
  Description of Artificial Sequence: Synthetic oligonucleotide
  Antisense strand to SEQ ID NO: 2577440
agugagaccacuaucuaaa

SEQ ID NO: 2577442 - RNA, 19 nt, Artificial Sequence
  Description of Artificial Sequence: Synthetic oligonucleotide
  Sense strand starting at position 3491 of SEQ ID NO: 1889072
ccaugcuuccaauaaacgu

SEQ ID NO: 2577443 - RNA, 19 nt, Artificial Sequence
  Description of Artificial Sequence: Synthetic oligonucleotide
  Antisense strand to SEQ ID NO: 2577442
acguuuauuggaagcaugg

SEQ ID NO: 2577444 - RNA, 19 nt, Artificial Sequence
  Description of Artificial Sequence: Synthetic oligonucleotide
  Sense strand starting at position 3513 of SEQ ID NO: 1889072
ugaauaaauucuucuguag

SEQ ID NO: 2577445 - RNA, 19 nt, Artificial Sequence
  Description of Artificial Sequence: Synthetic oligonucleotide
  Antisense strand to SEQ ID NO: 2577444
cuacagaagaauuuauuca

SEQ ID NO: 2577446 - RNA, 19 nt, Artificial Sequence
  Description of Artificial Sequence: Synthetic oligonucleotide
  Sense strand starting at position 3618 of SEQ ID NO: 1889072
ugaauauaccuguagguca

SEQ ID NO: 2577447 - RNA, 19 nt, Artificial Sequence
  Description of Artificial Sequence: Synthetic oligonucleotide
  Antisense strand to SEQ ID NO: 2577446
ugaccuacagguauauuca

SEQ ID NO: 2577448 - RNA, 19 nt, Artificial Sequence
  Description of Artificial Sequence: Synthetic oligonucleotide
  Sense strand starting at position 3681 of SEQ ID NO: 1889072
aggcucuaggcucaguuau

SEQ ID NO: 2577449 - RNA, 19 nt, Artificial Sequence
  Description of Artificial Sequence: Synthetic oligonucleotide
  Antisense strand to SEQ ID NO: 2577448
auaacugagccuagagccu

SEQ ID NO: 2577450 - RNA, 19 nt, Artificial Sequence
  Description of Artificial Sequence: Synthetic oligonucleotide
  Sense strand starting at position 3746 of SEQ ID NO: 1889072
guguauugaccugaucccu

SEQ ID NO: 2577451 - RNA, 19 nt, Artificial Sequence
  Description of Artificial Sequence: Synthetic oligonucleotide
  Antisense strand to SEQ ID NO: 2577450
agggaucaggucaauacac

SEQ ID NO: 2577452 - RNA, 19 nt, Artificial Sequence
  Description of Artificial Sequence: Synthetic oligonucleotide
  Sense strand starting at position 3752 of SEQ ID NO: 1889072
ugaccugaucccugggaca

SEQ ID NO: 2577453 - RNA, 19 nt, Artificial Sequence
  Description of Artificial Sequence: Synthetic oligonucleotide
  Antisense strand to SEQ ID NO: 2577452
ugucccagggaucagguca

SEQ ID NO: 2577454 - RNA, 19 nt, Artificial Sequence
  Description of Artificial Sequence: Synthetic oligonucleotide
  Sense strand starting at position 3765 of SEQ ID NO: 1889072
gggacaaguuucccagacu

SEQ ID NO: 2577455 - RNA, 19 nt, Artificial Sequence
  Description of Artificial Sequence: Synthetic oligonucleotide
  Antisense strand to SEQ ID NO: 2577454
agucugggaaacuuguccc

SEQ ID NO: 2577456 - RNA, 19 nt, Artificial Sequence
  Description of Artificial Sequence: Synthetic oligonucleotide
  Sense strand starting at position 3780 of SEQ ID NO: 1889072
gacugaaaucaugguauca

SEQ ID NO: 2577457 - RNA, 19 nt, Artificial Sequence
  Description of Artificial Sequence: Synthetic oligonucleotide
  Antisense strand to SEQ ID NO: 2577456
ugauaccaugauuucaguc

SEQ ID NO: 2577458 - RNA, 19 nt, Artificial Sequence
  Description of Artificial Sequence: Synthetic oligonucleotide
  Sense strand starting at position 3844 of SEQ ID NO: 1889072
ucaauccguguguaaauaa

SEQ ID NO: 2577459 - RNA, 19 nt, Artificial Sequence
  Description of Artificial Sequence: Synthetic oligonucleotide
  Antisense strand to SEQ ID NO: 2577458
uuauuuacacacggauuga

SEQ ID NO: 2577460 - RNA, 19 nt, Artificial Sequence
  Description of Artificial Sequence: Synthetic oligonucleotide
  Sense strand starting at position 3881 of SEQ ID NO: 1889072
agauguaugcaauaaugca

SEQ ID NO: 2577461 - RNA, 19 nt, Artificial Sequence
  Description of Artificial Sequence: Synthetic oligonucleotide
  Antisense strand to SEQ ID NO: 2577460
ugcauuauugcauacaucu

SEQ ID NO: 2577462 - RNA, 19 nt, Artificial Sequence
  Description of Artificial Sequence: Synthetic oligonucleotide
  Sense strand starting at position 3950 of SEQ ID NO: 1889072
aacagaucugaucguaauu

SEQ ID NO: 2577463 - RNA, 19 nt, Artificial Sequence
  Description of Artificial Sequence: Synthetic oligonucleotide
  Antisense strand to SEQ ID NO: 2577462
aauuacgaucagaucuguu

SEQ ID NO: 2577464 - RNA, 19 nt, Artificial Sequence
  Description of Artificial Sequence: Synthetic oligonucleotide
  Sense strand starting at position 116 of SEQ ID NO: 1889074
gcuaaucuucuuugaauug

SEQ ID NO: 2577465 - RNA, 19 nt, Artificial Sequence
  Description of Artificial Sequence: Synthetic oligonucleotide
  Antisense strand to SEQ ID NO: 2577464
caauucaaagaagauuagc

SEQ ID NO: 2577466 - RNA, 19 nt, Artificial Sequence
  Description of Artificial Sequence: Synthetic oligonucleotide
  Sense strand starting at position 123 of SEQ ID NO: 1889074
uucuuugaauuguucgaau

SEQ ID NO: 2577467 - RNA, 19 nt, Artificial Sequence
  Description of Artificial Sequence: Synthetic oligonucleotide
  Antisense strand to SEQ ID NO: 2577466
auucgaacaauucaaagaa

SEQ ID NO: 2577468 - RNA, 19 nt, Artificial Sequence
  Description of Artificial Sequence: Synthetic oligonucleotide
  Sense strand starting at position 343 of SEQ ID NO: 1889074
cugcuuugucagcugaguu

SEQ ID NO: 2577469 - RNA, 19 nt, Artificial Sequence
  Description of Artificial Sequence: Synthetic oligonucleotide
  Antisense strand to SEQ ID NO: 2577468
aacucagcugacaaagcag

SEQ ID NO: 2577470 - RNA, 19 nt, Artificial Sequence
  Description of Artificial Sequence: Synthetic oligonucleotide
  Sense strand starting at position 420 of SEQ ID NO: 1889074
gcacauaaauguguacaua

SEQ ID NO: 2577471 - RNA, 19 nt, Artificial Sequence
  Description of Artificial Sequence: Synthetic oligonucleotide
  Antisense strand to SEQ ID NO: 2577470
uauguacacauuuaugugc

SEQ ID NO: 2577472 - RNA, 19 nt, Artificial Sequence
  Description of Artificial Sequence: Synthetic oligonucleotide
  Sense strand starting at position 431 of SEQ ID NO: 1889074
uguacauaccauugguaua

SEQ ID NO: 2577473 - RNA, 19 nt, Artificial Sequence
  Description of Artificial Sequence: Synthetic oligonucleotide
  Antisense strand to SEQ ID NO: 2577472
uauaccaaugguauguaca

SEQ ID NO: 2577474 - RNA, 19 nt, Artificial Sequence
  Description of Artificial Sequence: Synthetic oligonucleotide
  Sense strand starting at position 441 of SEQ ID NO: 1889074
auugguauauacuugcuua

SEQ ID NO: 2577475 - RNA, 19 nt, Artificial Sequence
  Description of Artificial Sequence: Synthetic oligonucleotide
  Antisense strand to SEQ ID NO: 2577474
uaagcaaguauauaccaau

SEQ ID NO: 2577476 - RNA, 19 nt, Artificial Sequence
  Description of Artificial Sequence: Synthetic oligonucleotide
  Sense strand starting at position 449 of SEQ ID NO: 1889074
auacuugcuuauguugaua

SEQ ID NO: 2577477 - RNA, 19 nt, Artificial Sequence
  Description of Artificial Sequence: Synthetic oligonucleotide
  Antisense strand to SEQ ID NO: 2577476
uaucaacauaagcaaguau

SEQ ID NO: 2577478 - RNA, 19 nt, Artificial Sequence
  Description of Artificial Sequence: Synthetic oligonucleotide
  Sense strand starting at position 452 of SEQ ID NO: 1889074
cuugcuuauguugauauau

SEQ ID NO: 2577479 - RNA, 19 nt, Artificial Sequence
  Description of Artificial Sequence: Synthetic oligonucleotide
  Antisense strand to SEQ ID NO: 2577478
auauaucaacauaagcaag

SEQ ID NO: 2577480 - RNA, 19 nt, Artificial Sequence
  Description of Artificial Sequence: Synthetic oligonucleotide
  Sense strand starting at position 546 of SEQ ID NO: 1889074
cguacauuagaucauguga

SEQ ID NO: 2577481 - RNA, 19 nt, Artificial Sequence
  Description of Artificial Sequence: Synthetic oligonucleotide
  Antisense strand to SEQ ID NO: 2577480
ucacaugaucuaauguacg

SEQ ID NO: 2577482 - RNA, 19 nt, Artificial Sequence
  Description of Artificial Sequence: Synthetic oligonucleotide
  Sense strand starting at position 640 of SEQ ID NO: 1889074
ucaagaaacuaucugagca

SEQ ID NO: 2577483 - RNA, 19 nt, Artificial Sequence
  Description of Artificial Sequence: Synthetic oligonucleotide
  Antisense strand to SEQ ID NO: 2577482
ugcucagauaguuucuuga

SEQ ID NO: 2577484 - RNA, 19 nt, Artificial Sequence
  Description of Artificial Sequence: Synthetic oligonucleotide
  Sense strand starting at position 827 of SEQ ID NO: 1889074
ucagaaauguguguugaau

SEQ ID NO: 2577485 - RNA, 19 nt, Artificial Sequence
  Description of Artificial Sequence: Synthetic oligonucleotide
  Antisense strand to SEQ ID NO: 2577484
auucaacacacauuucuga

SEQ ID NO: 2577486 - RNA, 19 nt, Artificial Sequence
  Description of Artificial Sequence: Synthetic oligonucleotide
  Sense strand starting at position 835 of SEQ ID NO: 1889074
guguguugaauugaauaca

SEQ ID NO: 2577487 - RNA, 19 nt, Artificial Sequence
  Description of Artificial Sequence: Synthetic oligonucleotide
  Antisense strand to SEQ ID NO: 2577486
uguauucaauucaacacac

SEQ ID NO: 2577488 - RNA, 19 nt, Artificial Sequence
  Description of Artificial Sequence: Synthetic oligonucleotide
  Sense strand starting at position 881 of SEQ ID NO: 1889074
ggagcaauugcgcaguaag

SEQ ID NO: 2577489 - RNA, 19 nt, Artificial Sequence
  Description of Artificial Sequence: Synthetic oligonucleotide
  Antisense strand to SEQ ID NO: 2577488
cuuacugcgcaauugcucc

SEQ ID NO: 2577490 - RNA, 19 nt, Artificial Sequence
  Description of Artificial Sequence: Synthetic oligonucleotide
  Sense strand starting at position 915 of SEQ ID NO: 1889074
gccagauaacauggguucu

SEQ ID NO: 2577491 - RNA, 19 nt, Artificial Sequence
  Description of Artificial Sequence: Synthetic oligonucleotide
  Antisense strand to SEQ ID NO: 2577490
agaacccauguuaucuggc

SEQ ID NO: 2577492 - RNA, 19 nt, Artificial Sequence
  Description of Artificial Sequence: Synthetic oligonucleotide
  Sense strand starting at position 917 of SEQ ID NO: 1889074
cagauaacauggguucuaa

SEQ ID NO: 2577493 - RNA, 19 nt, Artificial Sequence
  Description of Artificial Sequence: Synthetic oligonucleotide
  Antisense strand to SEQ ID NO: 2577492
uuagaacccauguuaucug

SEQ ID NO: 2577494 - RNA, 19 nt, Artificial Sequence
  Description of Artificial Sequence: Synthetic oligonucleotide
  Sense strand starting at position 929 of SEQ ID NO: 1889074
guucuaaucuaacuaguug

SEQ ID NO: 2577495 - RNA, 19 nt, Artificial Sequence
  Description of Artificial Sequence: Synthetic oligonucleotide
  Antisense strand to SEQ ID NO: 2577494
caacuaguuagauuagaac

SEQ ID NO: 2577496 - RNA, 19 nt, Artificial Sequence
  Description of Artificial Sequence: Synthetic oligonucleotide
  Sense strand starting at position 955 of SEQ ID NO: 1889074
uuuagcaagcuaugaaauc

SEQ ID NO: 2577497 - RNA, 19 nt, Artificial Sequence
  Description of Artificial Sequence: Synthetic oligonucleotide
  Antisense strand to SEQ ID NO: 2577496
gauuucauagcuugcuaaa

SEQ ID NO: 2577498 - RNA, 19 nt, Artificial Sequence
  Description of Artificial Sequence: Synthetic oligonucleotide
  Sense strand starting at position 1148 of SEQ ID NO: 1889074
acaaauuucugugagucau

SEQ ID NO: 2577499 - RNA, 19 nt, Artificial Sequence
  Description of Artificial Sequence: Synthetic oligonucleotide
  Antisense strand to SEQ ID NO: 2577498
augacucacagaaauuugu

SEQ ID NO: 2577500 - RNA, 19 nt, Artificial Sequence
  Description of Artificial Sequence: Synthetic oligonucleotide
  Sense strand starting at position 1154 of SEQ ID NO: 1889074
uucugugagucauuaaacu

SEQ ID NO: 2577501 - RNA, 19 nt, Artificial Sequence
  Description of Artificial Sequence: Synthetic oligonucleotide
  Antisense strand to SEQ ID NO: 2577500
aguuuaaugacucacagaa

SEQ ID NO: 2577502 - RNA, 19 nt, Artificial Sequence
  Description of Artificial Sequence: Synthetic oligonucleotide
  Sense strand starting at position 1199 of SEQ ID NO: 1889074
gcgacauaauuauauuuga

SEQ ID NO: 2577503 - RNA, 19 nt, Artificial Sequence
  Description of Artificial Sequence: Synthetic oligonucleotide
  Antisense strand to SEQ ID NO: 2577502
ucaaauauaauuaugucgc

SEQ ID NO: 2577504 - RNA, 19 nt, Artificial Sequence
  Description of Artificial Sequence: Synthetic oligonucleotide
  Sense strand starting at position 1241 of SEQ ID NO: 1889074
aucugauagguuggaguuu

SEQ ID NO: 2577505 - RNA, 19 nt, Artificial Sequence
  Description of Artificial Sequence: Synthetic oligonucleotide
  Antisense strand to SEQ ID NO: 2577504
aaacuccaaccuaucagau

SEQ ID NO: 2577506 - RNA, 19 nt, Artificial Sequence
  Description of Artificial Sequence: Synthetic oligonucleotide
  Sense strand starting at position 1310 of SEQ ID NO: 1889074
uacugcuuaguuugagaau

SEQ ID NO: 2577507 - RNA, 19 nt, Artificial Sequence
  Description of Artificial Sequence: Synthetic oligonucleotide
  Antisense strand to SEQ ID NO: 2577506
auucucaaacuaagcagua

SEQ ID NO: 2577508 - RNA, 19 nt, Artificial Sequence
  Description of Artificial Sequence: Synthetic oligonucleotide
  Sense strand starting at position 1355 of SEQ ID NO: 1889074
caauuuaaguguuauggag

SEQ ID NO: 2577509 - RNA, 19 nt, Artificial Sequence
  Description of Artificial Sequence: Synthetic oligonucleotide
  Antisense strand to SEQ ID NO: 2577508
cuccauaacacuuaaauug

SEQ ID NO: 2577510 - RNA, 19 nt, Artificial Sequence
  Description of Artificial Sequence: Synthetic oligonucleotide
  Sense strand starting at position 1359 of SEQ ID NO: 1889074
uuaaguguuauggaguuaa

SEQ ID NO: 2577511 - RNA, 19 nt, Artificial Sequence
  Description of Artificial Sequence: Synthetic oligonucleotide
  Antisense strand to SEQ ID NO: 2577510
uuaacuccauaacacuuaa

SEQ ID NO: 2577512 - RNA, 19 nt, Artificial Sequence
  Description of Artificial Sequence: Synthetic oligonucleotide
  Sense strand starting at position 1572 of SEQ ID NO: 1889074
aggaaaucccuuugaucau

SEQ ID NO: 2577513 - RNA, 19 nt, Artificial Sequence
  Description of Artificial Sequence: Synthetic oligonucleotide
  Antisense strand to SEQ ID NO: 2577512
augaucaaagggauuuccu

SEQ ID NO: 2577514 - RNA, 19 nt, Artificial Sequence
  Description of Artificial Sequence: Synthetic oligonucleotide
  Sense strand starting at position 1624 of SEQ ID NO: 1889074
uuaggugucacaggguuua

SEQ ID NO: 2577515 - RNA, 19 nt, Artificial Sequence
  Description of Artificial Sequence: Synthetic oligonucleotide
  Antisense strand to SEQ ID NO: 2577514
uaaacccugugacaccuaa

SEQ ID NO: 2577516 - RNA, 19 nt, Artificial Sequence
  Description of Artificial Sequence: Synthetic oligonucleotide
  Sense strand starting at position 2082 of SEQ ID NO: 1889074
cgugaaacccgaagugugu

SEQ ID NO: 2577517 - RNA, 19 nt, Artificial Sequence
  Description of Artificial Sequence: Synthetic oligonucleotide
  Antisense strand to SEQ ID NO: 2577516
acacacuucggguuucacg

SEQ ID NO: 2577518 - RNA, 19 nt, Artificial Sequence
  Description of Artificial Sequence: Synthetic oligonucleotide
  Sense strand starting at position 2649 of SEQ ID NO: 1889074
guguucuuuguuguaaugu

SEQ ID NO: 2577519 - RNA, 19 nt, Artificial Sequence
  Description of Artificial Sequence: Synthetic oligonucleotide
  Antisense strand to SEQ ID NO: 2577518
acauuacaacaaagaacac

SEQ ID NO: 2577520 - RNA, 19 nt, Artificial Sequence
  Description of Artificial Sequence: Synthetic oligonucleotide
  Sense strand starting at position 2665 of SEQ ID NO: 1889074
uguugacaacccuguaaga

SEQ ID NO: 2577521 - RNA, 19 nt, Artificial Sequence
  Description of Artificial Sequence: Synthetic oligonucleotide
  Antisense strand to SEQ ID NO: 2577520
ucuuacaggguugucaaca

SEQ ID NO: 2577522 - RNA, 19 nt, Artificial Sequence
  Description of Artificial Sequence: Synthetic oligonucleotide
  Sense strand starting at position 2793 of SEQ ID NO: 1889074
ucggaucuguuuccaagaa

SEQ ID NO: 2577523 - RNA, 19 nt, Artificial Sequence
  Description of Artificial Sequence: Synthetic oligonucleotide
  Antisense strand to SEQ ID NO: 2577522
uucuuggaaacagauccga

SEQ ID NO: 2577524 - RNA, 19 nt, Artificial Sequence
  Description of Artificial Sequence: Synthetic oligonucleotide
  Sense strand starting at position 2926 of SEQ ID NO: 1889074
aaaggaagucuguguacau

SEQ ID NO: 2577525 - RNA, 19 nt, Artificial Sequence
  Description of Artificial Sequence: Synthetic oligonucleotide
  Antisense strand to SEQ ID NO: 2577524
auguacacagacuuccuuu

SEQ ID NO: 2577526 - RNA, 19 nt, Artificial Sequence
  Description of Artificial Sequence: Synthetic oligonucleotide
  Sense strand starting at position 2927 of SEQ ID NO: 1889074
aaggaagucuguguacaua

SEQ ID NO: 2577527 - RNA, 19 nt, Artificial Sequence
  Description of Artificial Sequence: Synthetic oligonucleotide
  Antisense strand to SEQ ID NO: 2577526
uauguacacagacuuccuu

SEQ ID NO: 2577528 - RNA, 19 nt, Artificial Sequence
  Description of Artificial Sequence: Synthetic oligonucleotide
  Sense strand starting at position 2981 of SEQ ID NO: 1889074
guuguaggauugucagauc

SEQ ID NO: 2577529 - RNA, 19 nt, Artificial Sequence
  Description of Artificial Sequence: Synthetic oligonucleotide
  Antisense strand to SEQ ID NO: 2577528
gaucugacaauccuacaac

SEQ ID NO: 2577530 - RNA, 19 nt, Artificial Sequence
  Description of Artificial Sequence: Synthetic oligonucleotide
  Sense strand starting at position 3027 of SEQ ID NO: 1889074
ugggaucuuacaggguaau

SEQ ID NO: 2577531 - RNA, 19 nt, Artificial Sequence
  Description of Artificial Sequence: Synthetic oligonucleotide
  Antisense strand to SEQ ID NO: 2577530
auuacccuguaagauccca

SEQ ID NO: 2577532 - RNA, 19 nt, Artificial Sequence
  Description of Artificial Sequence: Synthetic oligonucleotide
  Sense strand starting at position 3028 of SEQ ID NO: 1889074
gggaucuuacaggguaaug

SEQ ID NO: 2577533 - RNA, 19 nt, Artificial Sequence
  Description of Artificial Sequence: Synthetic oligonucleotide
  Antisense strand to SEQ ID NO: 2577532
cauuacccuguaagauccc

SEQ ID NO: 2577534 - RNA, 19 nt, Artificial Sequence
  Description of Artificial Sequence: Synthetic oligonucleotide
  Sense strand starting at position 3039 of SEQ ID NO: 1889074
ggguaauguggugagauga

SEQ ID NO: 2577535 - RNA, 19 nt, Artificial Sequence
  Description of Artificial Sequence: Synthetic oligonucleotide
  Antisense strand to SEQ ID NO: 2577534
ucaucucaccacauuaccc

SEQ ID NO: 2577536 - RNA, 19 nt, Artificial Sequence
  Description of Artificial Sequence: Synthetic oligonucleotide
  Sense strand starting at position 3047 of SEQ ID NO: 1889074
uggugagaugauggauucu

SEQ ID NO: 2577537 - RNA, 19 nt, Artificial Sequence
  Description of Artificial Sequence: Synthetic oligonucleotide
  Antisense strand to SEQ ID NO: 2577536
agaauccaucaucucacca

SEQ ID NO: 2577538 - RNA, 19 nt, Artificial Sequence
  Description of Artificial Sequence: Synthetic oligonucleotide
  Sense strand starting at position 3427 of SEQ ID NO: 1889074
aguggcacuucucuaauau

SEQ ID NO: 2577539 - RNA, 19 nt, Artificial Sequence
  Description of Artificial Sequence: Synthetic oligonucleotide
  Antisense strand to SEQ ID NO: 2577538
auauuagagaagugccacu

SEQ ID NO: 2577540 - RNA, 19 nt, Artificial Sequence
  Description of Artificial Sequence: Synthetic oligonucleotide
  Sense strand starting at position 3428 of SEQ ID NO: 1889074
guggcacuucucuaauauu

SEQ ID NO: 2577541 - RNA, 19 nt, Artificial Sequence
  Description of Artificial Sequence: Synthetic oligonucleotide
  Antisense strand to SEQ ID NO: 2577540
aauauuagagaagugccac

SEQ ID NO: 2577542 - RNA, 19 nt, Artificial Sequence
  Description of Artificial Sequence: Synthetic oligonucleotide
  Sense strand starting at position 3582 of SEQ ID NO: 1889074
agaagucaguaguucgaga

SEQ ID NO: 2577543 - RNA, 19 nt, Artificial Sequence
  Description of Artificial Sequence: Synthetic oligonucleotide
  Antisense strand to SEQ ID NO: 2577542
ucucgaacuacugacuucu

SEQ ID NO: 2577544 - RNA, 19 nt, Artificial Sequence
  Description of Artificial Sequence: Synthetic oligonucleotide
  Sense strand starting at position 20 of SEQ ID NO: 1889075
gagguauacuuagccuuag

SEQ ID NO: 2577545 - RNA, 19 nt, Artificial Sequence
  Description of Artificial Sequence: Synthetic oligonucleotide
  Antisense strand to SEQ ID NO: 2577544
cuaaggcuaaguauaccuc

SEQ ID NO: 2577546 - RNA, 19 nt, Artificial Sequence
  Description of Artificial Sequence: Synthetic oligonucleotide
  Sense strand starting at position 24 of SEQ ID NO: 1889075
uauacuuagccuuagguga

SEQ ID NO: 2577547 - RNA, 19 nt, Artificial Sequence
  Description of Artificial Sequence: Synthetic oligonucleotide
  Antisense strand to SEQ ID NO: 2577546
ucaccuaaggcuaaguaua

SEQ ID NO: 2577548 - RNA, 19 nt, Artificial Sequence
  Description of Artificial Sequence: Synthetic oligonucleotide
  Sense strand starting at position 85 of SEQ ID NO: 1889075
ccagauauccagcacugca

SEQ ID NO: 2577549 - RNA, 19 nt, Artificial Sequence
  Description of Artificial Sequence: Synthetic oligonucleotide
  Antisense strand to SEQ ID NO: 2577548
ugcagugcuggauaucugg

SEQ ID NO: 2577550 - RNA, 19 nt, Artificial Sequence
  Description of Artificial Sequence: Synthetic oligonucleotide
  Sense strand starting at position 236 of SEQ ID NO: 1889075
ucuccugacuggcuaaaga

SEQ ID NO: 2577551 - RNA, 19 nt, Artificial Sequence
  Description of Artificial Sequence: Synthetic oligonucleotide
  Antisense strand to SEQ ID NO: 2577550
ucuuuagccagucaggaga

SEQ ID NO: 2577552 - RNA, 19 nt, Artificial Sequence
  Description of Artificial Sequence: Synthetic oligonucleotide
  Sense strand starting at position 338 of SEQ ID NO: 1889075
ucuaauuggcugugaucaa

SEQ ID NO: 2577553 - RNA, 19 nt, Artificial Sequence
  Description of Artificial Sequence: Synthetic oligonucleotide
  Antisense strand to SEQ ID NO: 2577552
uugaucacagccaauuaga

SEQ ID NO: 2577554 - RNA, 19 nt, Artificial Sequence
  Description of Artificial Sequence: Synthetic oligonucleotide
  Sense strand starting at position 368 of SEQ ID NO: 1889075
uuucuaauugguuggguua

SEQ ID NO: 2577555 - RNA, 19 nt, Artificial Sequence
  Description of Artificial Sequence: Synthetic oligonucleotide
  Antisense strand to SEQ ID NO: 2577554
uaacccaaccaauuagaaa

SEQ ID NO: 2577556 - RNA, 19 nt, Artificial Sequence
  Description of Artificial Sequence: Synthetic oligonucleotide
  Sense strand starting at position 369 of SEQ ID NO: 1889075
uucuaauugguuggguuau

SEQ ID NO: 2577557 - RNA, 19 nt, Artificial Sequence
  Description of Artificial Sequence: Synthetic oligonucleotide
  Antisense strand to SEQ ID NO: 2577556
auaacccaaccaauuagaa

SEQ ID NO: 2577558 - RNA, 19 nt, Artificial Sequence
  Description of Artificial Sequence: Synthetic oligonucleotide
  Sense strand starting at position 380 of SEQ ID NO: 1889075
uggguuaugcagcaaucca

SEQ ID NO: 2577559 - RNA, 19 nt, Artificial Sequence
  Description of Artificial Sequence: Synthetic oligonucleotide
  Antisense strand to SEQ ID NO: 2577558
uggauugcugcauaaccca

SEQ ID NO: 2577560 - RNA, 19 nt, Artificial Sequence
  Description of Artificial Sequence: Synthetic oligonucleotide
  Sense strand starting at position 710 of SEQ ID NO: 1889075
acuugaacacugcgacaga

SEQ ID NO: 2577561 - RNA, 19 nt, Artificial Sequence
  Description of Artificial Sequence: Synthetic oligonucleotide
  Antisense strand to SEQ ID NO: 2577560
ucugucgcaguguucaagu

SEQ ID NO: 2577562 - RNA, 19 nt, Artificial Sequence
  Description of Artificial Sequence: Synthetic oligonucleotide
  Sense strand starting at position 943 of SEQ ID NO: 1889075
auagguuuagcucaugcaa

SEQ ID NO: 2577563 - RNA, 19 nt, Artificial Sequence
  Description of Artificial Sequence: Synthetic oligonucleotide
  Antisense strand to SEQ ID NO: 2577562
uugcaugagcuaaaccuau

SEQ ID NO: 2577564 - RNA, 19 nt, Artificial Sequence
  Description of Artificial Sequence: Synthetic oligonucleotide
  Sense strand starting at position 1043 of SEQ ID NO: 1889075
ccgaguuaugcggcaaguc

SEQ ID NO: 2577565 - RNA, 19 nt, Artificial Sequence
  Description of Artificial Sequence: Synthetic oligonucleotide
  Antisense strand to SEQ ID NO: 2577564
gacuugccgcauaacucgg

SEQ ID NO: 2577566 - RNA, 19 nt, Artificial Sequence
  Description of Artificial Sequence: Synthetic oligonucleotide
  Sense strand starting at position 1105 of SEQ ID NO: 1889075
agcuuaacugcagagucau

SEQ ID NO: 2577567 - RNA, 19 nt, Artificial Sequence
  Description of Artificial Sequence: Synthetic oligonucleotide
  Antisense strand to SEQ ID NO: 2577566
augacucugcaguuaagcu

SEQ ID NO: 2577568 - RNA, 19 nt, Artificial Sequence
  Description of Artificial Sequence: Synthetic oligonucleotide
  Sense strand starting at position 1116 of SEQ ID NO: 1889075
agagucauucucugccaaa

SEQ ID NO: 2577569 - RNA, 19 nt, Artificial Sequence
  Description of Artificial Sequence: Synthetic oligonucleotide
  Antisense strand to SEQ ID NO: 2577568
uuuggcagagaaugacucu

SEQ ID NO: 2577570 - RNA, 19 nt, Artificial Sequence
  Description of Artificial Sequence: Synthetic oligonucleotide
  Sense strand starting at position 1117 of SEQ ID NO: 1889075
gagucauucucugccaaag

SEQ ID NO: 2577571 - RNA, 19 nt, Artificial Sequence
  Description of Artificial Sequence: Synthetic oligonucleotide
  Antisense strand to SEQ ID NO: 2577570
cuuuggcagagaaugacuc

SEQ ID NO: 2577572 - RNA, 19 nt, Artificial Sequence
  Description of Artificial Sequence: Synthetic oligonucleotide
  Sense strand starting at position 1157 of SEQ ID NO: 1889075
accaaaugaucagcagcaa

SEQ ID NO: 2577573 - RNA, 19 nt, Artificial Sequence
  Description of Artificial Sequence: Synthetic oligonucleotide
  Antisense strand to SEQ ID NO: 2577572
uugcugcugaucauuuggu

SEQ ID NO: 2577574 - RNA, 19 nt, Artificial Sequence
  Description of Artificial Sequence: Synthetic oligonucleotide
  Sense strand starting at position 1972 of SEQ ID NO: 1889075
gcgaauugcagcgcuuuaa

SEQ ID NO: 2577575 - RNA, 19 nt, Artificial Sequence
  Description of Artificial Sequence: Synthetic oligonucleotide
  Antisense strand to SEQ ID NO: 2577574
uuaaagcgcugcaauucgc

SEQ ID NO: 2577576 - RNA, 19 nt, Artificial Sequence
  Description of Artificial Sequence: Synthetic oligonucleotide
  Sense strand starting at position 2028 of SEQ ID NO: 1889075
aggcguggccuagaagauu

SEQ ID NO: 2577577 - RNA, 19 nt, Artificial Sequence
  Description of Artificial Sequence: Synthetic oligonucleotide
  Antisense strand to SEQ ID NO: 2577576
aaucuucuaggccacgccu

SEQ ID NO: 2577578 - RNA, 19 nt, Artificial Sequence
  Description of Artificial Sequence: Synthetic oligonucleotide
  Sense strand starting at position 2043 of SEQ ID NO: 1889075
gauugaaagccggacaucu

SEQ ID NO: 2577579 - RNA, 19 nt, Artificial Sequence
  Description of Artificial Sequence: Synthetic oligonucleotide
  Antisense strand to SEQ ID NO: 2577578
agauguccggcuuucaauc

SEQ ID NO: 2577580 - RNA, 19 nt, Artificial Sequence
  Description of Artificial Sequence: Synthetic oligonucleotide
  Sense strand starting at position 2045 of SEQ ID NO: 1889075
uugaaagccggacaucuuu

SEQ ID NO: 2577581 - RNA, 19 nt, Artificial Sequence
  Description of Artificial Sequence: Synthetic oligonucleotide
  Antisense strand to SEQ ID NO: 2577580
aaagauguccggcuuucaa

SEQ ID NO: 2577582 - RNA, 19 nt, Artificial Sequence
  Description of Artificial Sequence: Synthetic oligonucleotide
  Sense strand starting at position 2060 of SEQ ID NO: 1889075
cuuugugauuugguugguu

SEQ ID NO: 2577583 - RNA, 19 nt, Artificial Sequence
  Description of Artificial Sequence: Synthetic oligonucleotide
  Antisense strand to SEQ ID NO: 2577582
aaccaaccaaaucacaaag

SEQ ID NO: 2577584 - RNA, 19 nt, Artificial Sequence
  Description of Artificial Sequence: Synthetic oligonucleotide
  Sense strand starting at position 2062 of SEQ ID NO: 1889075
uugugauuugguugguuca

SEQ ID NO: 2577585 - RNA, 19 nt, Artificial Sequence
  Description of Artificial Sequence: Synthetic oligonucleotide
  Antisense strand to SEQ ID NO: 2577584
ugaaccaaccaaaucacaa

SEQ ID NO: 2577586 - RNA, 19 nt, Artificial Sequence
  Description of Artificial Sequence: Synthetic oligonucleotide
  Sense strand starting at position 2063 of SEQ ID NO: 1889075
ugugauuugguugguucaa

SEQ ID NO: 2577587 - RNA, 19 nt, Artificial Sequence
  Description of Artificial Sequence: Synthetic oligonucleotide
  Antisense strand to SEQ ID NO: 2577586
uugaaccaaccaaaucaca

SEQ ID NO: 2577588 - RNA, 19 nt, Artificial Sequence
  Description of Artificial Sequence: Synthetic oligonucleotide
  Sense strand starting at position 2336 of SEQ ID NO: 1889075
cuuugauguguugauaaag

SEQ ID NO: 2577589 - RNA, 19 nt, Artificial Sequence
  Description of Artificial Sequence: Synthetic oligonucleotide
  Antisense strand to SEQ ID NO: 2577588
cuuuaucaacacaucaaag

SEQ ID NO: 2577590 - RNA, 19 nt, Artificial Sequence
  Description of Artificial Sequence: Synthetic oligonucleotide
  Sense strand starting at position 2426 of SEQ ID NO: 1889075
ggaguaauacauugagguu

SEQ ID NO: 2577591 - RNA, 19 nt, Artificial Sequence
  Description of Artificial Sequence: Synthetic oligonucleotide
  Antisense strand to SEQ ID NO: 2577590
aaccucaauguauuacucc

SEQ ID NO: 2577592 - RNA, 19 nt, Artificial Sequence
  Description of Artificial Sequence: Synthetic oligonucleotide
  Sense strand starting at position 2676 of SEQ ID NO: 1889075
gagucaauuggugagcaag

SEQ ID NO: 2577593 - RNA, 19 nt, Artificial Sequence
  Description of Artificial Sequence: Synthetic oligonucleotide
  Antisense strand to SEQ ID NO: 2577592
cuugcucaccaauugacuc

SEQ ID NO: 2577594 - RNA, 19 nt, Artificial Sequence
  Description of Artificial Sequence: Synthetic oligonucleotide
  Sense strand starting at position 2767 of SEQ ID NO: 1889075
ugugaccuguuuguaauuu

SEQ ID NO: 2577595 - RNA, 19 nt, Artificial Sequence
  Description of Artificial Sequence: Synthetic oligonucleotide
  Antisense strand to SEQ ID NO: 2577594
aaauuacaaacaggucaca

SEQ ID NO: 2577596 - RNA, 19 nt, Artificial Sequence
  Description of Artificial Sequence: Synthetic oligonucleotide
  Sense strand starting at position 2887 of SEQ ID NO: 1889075
cucugucaguaacugauaa

SEQ ID NO: 2577597 - RNA, 19 nt, Artificial Sequence
  Description of Artificial Sequence: Synthetic oligonucleotide
  Antisense strand to SEQ ID NO: 2577596
uuaucaguuacugacagag

SEQ ID NO: 2577598 - RNA, 19 nt, Artificial Sequence
  Description of Artificial Sequence: Synthetic oligonucleotide
  Sense strand starting at position 2970 of SEQ ID NO: 1889075
ggaagcaauuaaucucaua

SEQ ID NO: 2577599 - RNA, 19 nt, Artificial Sequence
  Description of Artificial Sequence: Synthetic oligonucleotide
  Antisense strand to SEQ ID NO: 2577598
uaugagauuaauugcuucc

SEQ ID NO: 2577600 - RNA, 19 nt, Artificial Sequence
  Description of Artificial Sequence: Synthetic oligonucleotide
  Sense strand starting at position 2992 of SEQ ID NO: 1889075
ucuucuaugucauucgaga

SEQ ID NO: 2577601 - RNA, 19 nt, Artificial Sequence
  Description of Artificial Sequence: Synthetic oligonucleotide
  Antisense strand to SEQ ID NO: 2577600
ucucgaaugacauagaaga

SEQ ID NO: 2577602 - RNA, 19 nt, Artificial Sequence
  Description of Artificial Sequence: Synthetic oligonucleotide
  Sense strand starting at position 3037 of SEQ ID NO: 1889075
auggcaacuuaaguauuau

SEQ ID NO: 2577603 - RNA, 19 nt, Artificial Sequence
  Description of Artificial Sequence: Synthetic oligonucleotide
  Antisense strand to SEQ ID NO: 2577602
auaauacuuaaguugccau

SEQ ID NO: 2577604 - RNA, 19 nt, Artificial Sequence
  Description of Artificial Sequence: Synthetic oligonucleotide
  Sense strand starting at position 3057 of SEQ ID NO: 1889075
gagcaacuucuagaaaguc

SEQ ID NO: 2577605 - RNA, 19 nt, Artificial Sequence
  Description of Artificial Sequence: Synthetic oligonucleotide
  Antisense strand to SEQ ID NO: 2577604
gacuuucuagaaguugcuc

SEQ ID NO: 2577606 - RNA, 19 nt, Artificial Sequence
  Description of Artificial Sequence: Synthetic oligonucleotide
  Sense strand starting at position 3219 of SEQ ID NO: 1889075
guguccuuggaucaaacaa

SEQ ID NO: 2577607 - RNA, 19 nt, Artificial Sequence
  Description of Artificial Sequence: Synthetic oligonucleotide
  Antisense strand to SEQ ID NO: 2577606
uuguuugauccaaggacac

SEQ ID NO: 2577608 - RNA, 19 nt, Artificial Sequence
  Description of Artificial Sequence: Synthetic oligonucleotide
  Sense strand starting at position 3254 of SEQ ID NO: 1889075
ugucauuccaaaugagggu

SEQ ID NO: 2577609 - RNA, 19 nt, Artificial Sequence
  Description of Artificial Sequence: Synthetic oligonucleotide
  Antisense strand to SEQ ID NO: 2577608
acccucauuuggaaugaca

SEQ ID NO: 2577610 - RNA, 19 nt, Artificial Sequence
  Description of Artificial Sequence: Synthetic oligonucleotide
  Sense strand starting at position 3258 of SEQ ID NO: 1889075
auuccaaaugaggguuauu

SEQ ID NO: 2577611 - RNA, 19 nt, Artificial Sequence
  Description of Artificial Sequence: Synthetic oligonucleotide
  Antisense strand to SEQ ID NO: 2577610
aauaacccucauuuggaau

SEQ ID NO: 2577612 - RNA, 19 nt, Artificial Sequence
  Description of Artificial Sequence: Synthetic oligonucleotide
  Sense strand starting at position 3263 of SEQ ID NO: 1889075
aaaugaggguuauuguauu

SEQ ID NO: 2577613 - RNA, 19 nt, Artificial Sequence
  Description of Artificial Sequence: Synthetic oligonucleotide
  Antisense strand to SEQ ID NO: 2577612
aauacaauaacccucauuu

SEQ ID NO: 2577614 - RNA, 19 nt, Artificial Sequence
  Description of Artificial Sequence: Synthetic oligonucleotide
  Sense strand starting at position 3281 of SEQ ID NO: 1889075
uguaaaguggugcaauaca

SEQ ID NO: 2577615 - RNA, 19 nt, Artificial Sequence
  Description of Artificial Sequence: Synthetic oligonucleotide
  Antisense strand to SEQ ID NO: 2577614
uguauugcaccacuuuaca

SEQ ID NO: 2577616 - RNA, 19 nt, Artificial Sequence
  Description of Artificial Sequence: Synthetic oligonucleotide
  Sense strand starting at position 3347 of SEQ ID NO: 1889075
cagugacaccuaugaagca

SEQ ID NO: 2577617 - RNA, 19 nt, Artificial Sequence
  Description of Artificial Sequence: Synthetic oligonucleotide
  Antisense strand to SEQ ID NO: 2577616
ugcuucauaggugucacug

SEQ ID NO: 2577618 - RNA, 19 nt, Artificial Sequence
  Description of Artificial Sequence: Synthetic oligonucleotide
  Sense strand starting at position 3418 of SEQ ID NO: 1889075
aguuucuacaaguguggaa

SEQ ID NO: 2577619 - RNA, 19 nt, Artificial Sequence
  Description of Artificial Sequence: Synthetic oligonucleotide
  Antisense strand to SEQ ID NO: 2577618
uuccacacuuguagaaacu

SEQ ID NO: 2577620 - RNA, 19 nt, Artificial Sequence
  Description of Artificial Sequence: Synthetic oligonucleotide
  Sense strand starting at position 3420 of SEQ ID NO: 1889075
uuucuacaaguguggaaau

SEQ ID NO: 2577621 - RNA, 19 nt, Artificial Sequence
  Description of Artificial Sequence: Synthetic oligonucleotide
  Antisense strand to SEQ ID NO: 2577620
auuuccacacuuguagaaa

SEQ ID NO: 2577622 - RNA, 19 nt, Artificial Sequence
  Description of Artificial Sequence: Synthetic oligonucleotide
  Sense strand starting at position 3422 of SEQ ID NO: 1889075
ucuacaaguguggaaaugu

SEQ ID NO: 2577623 - RNA, 19 nt, Artificial Sequence
  Description of Artificial Sequence: Synthetic oligonucleotide
  Antisense strand to SEQ ID NO: 2577622
acauuuccacacuuguaga

SEQ ID NO: 2577624 - RNA, 19 nt, Artificial Sequence
  Description of Artificial Sequence: Synthetic oligonucleotide
  Sense strand starting at position 243 of SEQ ID NO: 1889076
ucgacugucuauguuauca

SEQ ID NO: 2577625 - RNA, 19 nt, Artificial Sequence
  Description of Artificial Sequence: Synthetic oligonucleotide
  Antisense strand to SEQ ID NO: 2577624
ugauaacauagacagucga

SEQ ID NO: 2577626 - RNA, 19 nt, Artificial Sequence
  Description of Artificial Sequence: Synthetic oligonucleotide
  Sense strand starting at position 247 of SEQ ID NO: 1889076
cugucuauguuaucaguaa

SEQ ID NO: 2577627 - RNA, 19 nt, Artificial Sequence
  Description of Artificial Sequence: Synthetic oligonucleotide
  Antisense strand to SEQ ID NO: 2577626
uuacugauaacauagacag

SEQ ID NO: 2577628 - RNA, 19 nt, Artificial Sequence
  Description of Artificial Sequence: Synthetic oligonucleotide
  Sense strand starting at position 259 of SEQ ID NO: 1889076
ucaguaagguuauugguca

SEQ ID NO: 2577629 - RNA, 19 nt, Artificial Sequence
  Description of Artificial Sequence: Synthetic oligonucleotide
  Antisense strand to SEQ ID NO: 2577628
ugaccaauaaccuuacuga

SEQ ID NO: 2577630 - RNA, 19 nt, Artificial Sequence
  Description of Artificial Sequence: Synthetic oligonucleotide
  Sense strand starting at position 263 of SEQ ID NO: 1889076
uaagguuauuggucaacaa

SEQ ID NO: 2577631 - RNA, 19 nt, Artificial Sequence
  Description of Artificial Sequence: Synthetic oligonucleotide
  Antisense strand to SEQ ID NO: 2577630
uuguugaccaauaaccuua

SEQ ID NO: 2577632 - RNA, 19 nt, Artificial Sequence
  Description of Artificial Sequence: Synthetic oligonucleotide
  Sense strand starting at position 284 of SEQ ID NO: 1889076
ggcuauuaguaguuaauau

SEQ ID NO: 2577633 - RNA, 19 nt, Artificial Sequence
  Description of Artificial Sequence: Synthetic oligonucleotide
  Antisense strand to SEQ ID NO: 2577632
auauuaacuacuaauagcc

SEQ ID NO: 2577634 - RNA, 19 nt, Artificial Sequence
  Description of Artificial Sequence: Synthetic oligonucleotide
  Sense strand starting at position 346 of SEQ ID NO: 1889076
aaaggucagugcuucuaau

SEQ ID NO: 2577635 - RNA, 19 nt, Artificial Sequence
  Description of Artificial Sequence: Synthetic oligonucleotide
  Antisense strand to SEQ ID NO: 2577634
auuagaagcacugaccuuu

SEQ ID NO: 2577636 - RNA, 19 nt, Artificial Sequence
  Description of Artificial Sequence: Synthetic oligonucleotide
  Sense strand starting at position 968 of SEQ ID NO: 1889076
aauggaucaggcugucaca

SEQ ID NO: 2577637 - RNA, 19 nt, Artificial Sequence
  Description of Artificial Sequence: Synthetic oligonucleotide
  Antisense strand to SEQ ID NO: 2577636
ugugacagccugauccauu

SEQ ID NO: 2577638 - RNA, 19 nt, Artificial Sequence
  Description of Artificial Sequence: Synthetic oligonucleotide
  Sense strand starting at position 992 of SEQ ID NO: 1889076
gcuugagucagagauggug

SEQ ID NO: 2577639 - RNA, 19 nt, Artificial Sequence
  Description of Artificial Sequence: Synthetic oligonucleotide
  Antisense strand to SEQ ID NO: 2577638
caccaucucugacucaagc

SEQ ID NO: 2577640 - RNA, 19 nt, Artificial Sequence
  Description of Artificial Sequence: Synthetic oligonucleotide
  Sense strand starting at position 998 of SEQ ID NO: 1889076
gucagagauggugguuaug

SEQ ID NO: 2577641 - RNA, 19 nt, Artificial Sequence
  Description of Artificial Sequence: Synthetic oligonucleotide
  Antisense strand to SEQ ID NO: 2577640
cauaaccaccaucucugac

SEQ ID NO: 2577642 - RNA, 19 nt, Artificial Sequence
  Description of Artificial Sequence: Synthetic oligonucleotide
  Sense strand starting at position 1109 of SEQ ID NO: 1889076
gugcguggcgucagacuaa

SEQ ID NO: 2577643 - RNA, 19 nt, Artificial Sequence
  Description of Artificial Sequence: Synthetic oligonucleotide
  Antisense strand to SEQ ID NO: 2577642
uuagucugacgccacgcac

SEQ ID NO: 2577644 - RNA, 19 nt, Artificial Sequence
  Description of Artificial Sequence: Synthetic oligonucleotide
  Sense strand starting at position 1929 of SEQ ID NO: 1889076
ccacgaagcugacuuaacu

SEQ ID NO: 2577645 - RNA, 19 nt, Artificial Sequence
  Description of Artificial Sequence: Synthetic oligonucleotide
  Antisense strand to SEQ ID NO: 2577644
aguuaagucagcuucgugg

SEQ ID NO: 2577646 - RNA, 19 nt, Artificial Sequence
  Description of Artificial Sequence: Synthetic oligonucleotide
  Sense strand starting at position 2088 of SEQ ID NO: 1889076
cggccaauucuauaauguu

SEQ ID NO: 2577647 - RNA, 19 nt, Artificial Sequence
  Description of Artificial Sequence: Synthetic oligonucleotide
  Antisense strand to SEQ ID NO: 2577646
aacauuauagaauuggccg

SEQ ID NO: 2577648 - RNA, 19 nt, Artificial Sequence
  Description of Artificial Sequence: Synthetic oligonucleotide
  Sense strand starting at position 2167 of SEQ ID NO: 1889076
caggccgaucugcaagaaa

SEQ ID NO: 2577649 - RNA, 19 nt, Artificial Sequence
  Description of Artificial Sequence: Synthetic oligonucleotide
  Antisense strand to SEQ ID NO: 2577648
uuucuugcagaucggccug

SEQ ID NO: 2577650 - RNA, 19 nt, Artificial Sequence
  Description of Artificial Sequence: Synthetic oligonucleotide
  Sense strand starting at position 2813 of SEQ ID NO: 1889076
uuugcuauggauugaauau

SEQ ID NO: 2577651 - RNA, 19 nt, Artificial Sequence
  Description of Artificial Sequence: Synthetic oligonucleotide
  Antisense strand to SEQ ID NO: 2577650
auauucaauccauagcaaa

SEQ ID NO: 2577652 - RNA, 19 nt, Artificial Sequence
  Description of Artificial Sequence: Synthetic oligonucleotide
  Sense strand starting at position 2826 of SEQ ID NO: 1889076
gaauauuuguccgcuccga

SEQ ID NO: 2577653 - RNA, 19 nt, Artificial Sequence
  Description of Artificial Sequence: Synthetic oligonucleotide
  Antisense strand to SEQ ID NO: 2577652
ucggagcggacaaauauuc

SEQ ID NO: 2577654 - RNA, 19 nt, Artificial Sequence
  Description of Artificial Sequence: Synthetic oligonucleotide
  Sense strand starting at position 2830 of SEQ ID NO: 1889076
auuuguccgcuccgaaauu

SEQ ID NO: 2577655 - RNA, 19 nt, Artificial Sequence
  Description of Artificial Sequence: Synthetic oligonucleotide
  Antisense strand to SEQ ID NO: 2577654
aauuucggagcggacaaau

SEQ ID NO: 2577656 - RNA, 19 nt, Artificial Sequence
  Description of Artificial Sequence: Synthetic oligonucleotide
  Sense strand starting at position 2852 of SEQ ID NO: 1889076
guugaaaugugaguuguaa

SEQ ID NO: 2577657 - RNA, 19 nt, Artificial Sequence
  Description of Artificial Sequence: Synthetic oligonucleotide
  Antisense strand to SEQ ID NO: 2577656
uuacaacucacauuucaac

SEQ ID NO: 2577658 - RNA, 19 nt, Artificial Sequence
  Description of Artificial Sequence: Synthetic oligonucleotide
  Sense strand starting at position 2854 of SEQ ID NO: 1889076
ugaaaugugaguuguaaca

SEQ ID NO: 2577659 - RNA, 19 nt, Artificial Sequence
  Description of Artificial Sequence: Synthetic oligonucleotide
  Antisense strand to SEQ ID NO: 2577658
uguuacaacucacauuuca

SEQ ID NO: 2577660 - RNA, 19 nt, Artificial Sequence
  Description of Artificial Sequence: Synthetic oligonucleotide
  Sense strand starting at position 2867 of SEQ ID NO: 1889076
guaacauacuaaguaaugu

SEQ ID NO: 2577661 - RNA, 19 nt, Artificial Sequence
  Description of Artificial Sequence: Synthetic oligonucleotide
  Antisense strand to SEQ ID NO: 2577660
acauuacuuaguauguuac

SEQ ID NO: 2577662 - RNA, 19 nt, Artificial Sequence
  Description of Artificial Sequence: Synthetic oligonucleotide
  Sense strand starting at position 2896 of SEQ ID NO: 1889076
aguacuaagaggugggauu

SEQ ID NO: 2577663 - RNA, 19 nt, Artificial Sequence
  Description of Artificial Sequence: Synthetic oligonucleotide
  Antisense strand to SEQ ID NO: 2577662
aaucccaccucuuaguacu

SEQ ID NO: 2577664 - RNA, 19 nt, Artificial Sequence
  Description of Artificial Sequence: Synthetic oligonucleotide
  Sense strand starting at position 3100 of SEQ ID NO: 1889076
aauuacucggucugugaua

SEQ ID NO: 2577665 - RNA, 19 nt, Artificial Sequence
  Description of Artificial Sequence: Synthetic oligonucleotide
  Antisense strand to SEQ ID NO: 2577664
uaucacagaccgaguaauu

SEQ ID NO: 2577666 - RNA, 19 nt, Artificial Sequence
  Description of Artificial Sequence: Synthetic oligonucleotide
  Sense strand starting at position 3101 of SEQ ID NO: 1889076
auuacucggucugugauau

SEQ ID NO: 2577667 - RNA, 19 nt, Artificial Sequence
  Description of Artificial Sequence: Synthetic oligonucleotide
  Antisense strand to SEQ ID NO: 2577666
auaucacagaccgaguaau

SEQ ID NO: 2577668 - RNA, 19 nt, Artificial Sequence
  Description of Artificial Sequence: Synthetic oligonucleotide
  Sense strand starting at position 3202 of SEQ ID NO: 1889076
ugaaauauguaucuagacu

SEQ ID NO: 2577669 - RNA, 19 nt, Artificial Sequence
  Description of Artificial Sequence: Synthetic oligonucleotide
  Antisense strand to SEQ ID NO: 2577668
agucuagauacauauuuca

SEQ ID NO: 2577670 - RNA, 19 nt, Artificial Sequence
  Description of Artificial Sequence: Synthetic oligonucleotide
  Sense strand starting at position 3208 of SEQ ID NO: 1889076
auguaucuagacugguuga

SEQ ID NO: 2577671 - RNA, 19 nt, Artificial Sequence
  Description of Artificial Sequence: Synthetic oligonucleotide
  Antisense strand to SEQ ID NO: 2577670
ucaaccagucuagauacau

SEQ ID NO: 2577672 - RNA, 19 nt, Artificial Sequence
  Description of Artificial Sequence: Synthetic oligonucleotide
  Sense strand starting at position 3209 of SEQ ID NO: 1889076
uguaucuagacugguugaa

SEQ ID NO: 2577673 - RNA, 19 nt, Artificial Sequence
  Description of Artificial Sequence: Synthetic oligonucleotide
  Antisense strand to SEQ ID NO: 2577672
uucaaccagucuagauaca

SEQ ID NO: 2577674 - RNA, 19 nt, Artificial Sequence
  Description of Artificial Sequence: Synthetic oligonucleotide
  Sense strand starting at position 3211 of SEQ ID NO: 1889076
uaucuagacugguugaaau

SEQ ID NO: 2577675 - RNA, 19 nt, Artificial Sequence
  Description of Artificial Sequence: Synthetic oligonucleotide
  Antisense strand to SEQ ID NO: 2577674
auuucaaccagucuagaua

SEQ ID NO: 2577676 - RNA, 19 nt, Artificial Sequence
  Description of Artificial Sequence: Synthetic oligonucleotide
  Sense strand starting at position 3268 of SEQ ID NO: 1889076
ggucaagagucucucaguu

SEQ ID NO: 2577677 - RNA, 19 nt, Artificial Sequence
  Description of Artificial Sequence: Synthetic oligonucleotide
  Antisense strand to SEQ ID NO: 2577676
aacugagagacucuugacc

SEQ ID NO: 2577678 - RNA, 19 nt, Artificial Sequence
  Description of Artificial Sequence: Synthetic oligonucleotide
  Sense strand starting at position 3275 of SEQ ID NO: 1889076
agucucucaguuuauagua

SEQ ID NO: 2577679 - RNA, 19 nt, Artificial Sequence
  Description of Artificial Sequence: Synthetic oligonucleotide
  Antisense strand to SEQ ID NO: 2577678
uacuauaaacugagagacu

SEQ ID NO: 2577680 - RNA, 19 nt, Artificial Sequence
  Description of Artificial Sequence: Synthetic oligonucleotide
  Sense strand starting at position 3306 of SEQ ID NO: 1889076
accaguguagaaugaugau

SEQ ID NO: 2577681 - RNA, 19 nt, Artificial Sequence
  Description of Artificial Sequence: Synthetic oligonucleotide
  Antisense strand to SEQ ID NO: 2577680
aucaucauucuacacuggu

SEQ ID NO: 2577682 - RNA, 19 nt, Artificial Sequence
  Description of Artificial Sequence: Synthetic oligonucleotide
  Sense strand starting at position 3315 of SEQ ID NO: 1889076
gaaugaugauaacuuguuu

SEQ ID NO: 2577683 - RNA, 19 nt, Artificial Sequence
  Description of Artificial Sequence: Synthetic oligonucleotide
  Antisense strand to SEQ ID NO: 2577682
aaacaaguuaucaucauuc

SEQ ID NO: 2577684 - RNA, 19 nt, Artificial Sequence
  Description of Artificial Sequence: Synthetic oligonucleotide
  Sense strand starting at position 3457 of SEQ ID NO: 1889076
uguugacucuuguuucuca

SEQ ID NO: 2577685 - RNA, 19 nt, Artificial Sequence
  Description of Artificial Sequence: Synthetic oligonucleotide
  Antisense strand to SEQ ID NO: 2577684
ugagaaacaagagucaaca

SEQ ID NO: 2577686 - RNA, 19 nt, Artificial Sequence
  Description of Artificial Sequence: Synthetic oligonucleotide
  Sense strand starting at position 3502 of SEQ ID NO: 1889076
auaucaugccuuugagaac

SEQ ID NO: 2577687 - RNA, 19 nt, Artificial Sequence
  Description of Artificial Sequence: Synthetic oligonucleotide
  Antisense strand to SEQ ID NO: 2577686
guucucaaaggcaugauau

SEQ ID NO: 2577688 - RNA, 19 nt, Artificial Sequence
  Description of Artificial Sequence: Synthetic oligonucleotide
  Sense strand starting at position 3513 of SEQ ID NO: 1889076
uugagaaccuaagcgaaua

SEQ ID NO: 2577689 - RNA, 19 nt, Artificial Sequence
  Description of Artificial Sequence: Synthetic oligonucleotide
  Antisense strand to SEQ ID NO: 2577688
uauucgcuuagguucucaa

SEQ ID NO: 2577690 - RNA, 19 nt, Artificial Sequence
  Description of Artificial Sequence: Synthetic oligonucleotide
  Sense strand starting at position 3524 of SEQ ID NO: 1889076
agcgaauaguuucucuaau

SEQ ID NO: 2577691 - RNA, 19 nt, Artificial Sequence
  Description of Artificial Sequence: Synthetic oligonucleotide
  Antisense strand to SEQ ID NO: 2577690
auuagagaaacuauucgcu

SEQ ID NO: 2577692 - RNA, 19 nt, Artificial Sequence
  Description of Artificial Sequence: Synthetic oligonucleotide
  Sense strand starting at position 3525 of SEQ ID NO: 1889076
gcgaauaguuucucuaaug

SEQ ID NO: 2577693 - RNA, 19 nt, Artificial Sequence
  Description of Artificial Sequence: Synthetic oligonucleotide
  Antisense strand to SEQ ID NO: 2577692
cauuagagaaacuauucgc

SEQ ID NO: 2577694 - RNA, 19 nt, Artificial Sequence
  Description of Artificial Sequence: Synthetic oligonucleotide
  Sense strand starting at position 3526 of SEQ ID NO: 1889076
cgaauaguuucucuaauga

SEQ ID NO: 2577695 - RNA, 19 nt, Artificial Sequence
  Description of Artificial Sequence: Synthetic oligonucleotide
  Antisense strand to SEQ ID NO: 2577694
ucauuagagaaacuauucg

SEQ ID NO: 2577696 - RNA, 19 nt, Artificial Sequence
  Description of Artificial Sequence: Synthetic oligonucleotide
  Sense strand starting at position 3561 of SEQ ID NO: 1889076
gcacuaauggcuuaaaguu

SEQ ID NO: 2577697 - RNA, 19 nt, Artificial Sequence
  Description of Artificial Sequence: Synthetic oligonucleotide
  Antisense strand to SEQ ID NO: 2577696
aacuuuaagccauuagugc

SEQ ID NO: 2577698 - RNA, 19 nt, Artificial Sequence
  Description of Artificial Sequence: Synthetic oligonucleotide
  Sense strand starting at position 3634 of SEQ ID NO: 1889076
gcacaugaggucuagaguu

SEQ ID NO: 2577699 - RNA, 19 nt, Artificial Sequence
  Description of Artificial Sequence: Synthetic oligonucleotide
  Antisense strand to SEQ ID NO: 2577698
aacucuagaccucaugugc

SEQ ID NO: 2577700 - RNA, 19 nt, Artificial Sequence
  Description of Artificial Sequence: Synthetic oligonucleotide
  Sense strand starting at position 3636 of SEQ ID NO: 1889076
acaugaggucuagaguuug

SEQ ID NO: 2577701 - RNA, 19 nt, Artificial Sequence
  Description of Artificial Sequence: Synthetic oligonucleotide
  Antisense strand to SEQ ID NO: 2577700
caaacucuagaccucaugu

SEQ ID NO: 2577702 - RNA, 19 nt, Artificial Sequence
  Description of Artificial Sequence: Synthetic oligonucleotide
  Sense strand starting at position 3903 of SEQ ID NO: 1889076
agagaaauauuugagguca

SEQ ID NO: 2577703 - RNA, 19 nt, Artificial Sequence
  Description of Artificial Sequence: Synthetic oligonucleotide
  Antisense strand to SEQ ID NO: 2577702
ugaccucaaauauuucucu

SEQ ID NO: 2577704 - RNA, 19 nt, Artificial Sequence
  Description of Artificial Sequence: Synthetic oligonucleotide
  Sense strand starting at position 65 of SEQ ID NO: 1889077
ugacauccaguuuggagaa

SEQ ID NO: 2577705 - RNA, 19 nt, Artificial Sequence
  Description of Artificial Sequence: Synthetic oligonucleotide
  Antisense strand to SEQ ID NO: 2577704
uucuccaaacuggauguca

SEQ ID NO: 2577706 - RNA, 19 nt, Artificial Sequence
  Description of Artificial Sequence: Synthetic oligonucleotide
  Sense strand starting at position 100 of SEQ ID NO: 1889077
cuguuuagaggugaaaguu

SEQ ID NO: 2577707 - RNA, 19 nt, Artificial Sequence
  Description of Artificial Sequence: Synthetic oligonucleotide
  Antisense strand to SEQ ID NO: 2577706
aacuuucaccucuaaacag

SEQ ID NO: 2577708 - RNA, 19 nt, Artificial Sequence
  Description of Artificial Sequence: Synthetic oligonucleotide
  Sense strand starting at position 174 of SEQ ID NO: 1889077
ccuaguuaccacugguaag

SEQ ID NO: 2577709 - RNA, 19 nt, Artificial Sequence
  Description of Artificial Sequence: Synthetic oligonucleotide
  Antisense strand to SEQ ID NO: 2577708
cuuaccagugguaacuagg

SEQ ID NO: 2577710 - RNA, 19 nt, Artificial Sequence
  Description of Artificial Sequence: Synthetic oligonucleotide
  Sense strand starting at position 249 of SEQ ID NO: 1889077
ggauuaaaguccuugcuca

SEQ ID NO: 2577711 - RNA, 19 nt, Artificial Sequence
  Description of Artificial Sequence: Synthetic oligonucleotide
  Antisense strand to SEQ ID NO: 2577710
ugagcaaggacuuuaaucc

SEQ ID NO: 2577712 - RNA, 19 nt, Artificial Sequence
  Description of Artificial Sequence: Synthetic oligonucleotide
  Sense strand starting at position 313 of SEQ ID NO: 1889077
uggugagaguggaagucua

SEQ ID NO: 2577713 - RNA, 19 nt, Artificial Sequence
  Description of Artificial Sequence: Synthetic oligonucleotide
  Antisense strand to SEQ ID NO: 2577712
uagacuuccacucucacca

SEQ ID NO: 2577714 - RNA, 19 nt, Artificial Sequence
  Description of Artificial Sequence: Synthetic oligonucleotide
  Sense strand starting at position 385 of SEQ ID NO: 1889077
ggcauucuacuguacuaag

SEQ ID NO: 2577715 - RNA, 19 nt, Artificial Sequence
  Description of Artificial Sequence: Synthetic oligonucleotide
  Antisense strand to SEQ ID NO: 2577714
cuuaguacaguagaaugcc

SEQ ID NO: 2577716 - RNA, 19 nt, Artificial Sequence
  Description of Artificial Sequence: Synthetic oligonucleotide
  Sense strand starting at position 492 of SEQ ID NO: 1889077
cagacuuuaccugggacau

SEQ ID NO: 2577717 - RNA, 19 nt, Artificial Sequence
  Description of Artificial Sequence: Synthetic oligonucleotide
  Antisense strand to SEQ ID NO: 2577716
augucccagguaaagucug

SEQ ID NO: 2577718 - RNA, 19 nt, Artificial Sequence
  Description of Artificial Sequence: Synthetic oligonucleotide
  Sense strand starting at position 641 of SEQ ID NO: 1889077
acaggacucuugcugaaug

SEQ ID NO: 2577719 - RNA, 19 nt, Artificial Sequence
  Description of Artificial Sequence: Synthetic oligonucleotide
  Antisense strand to SEQ ID NO: 2577718
cauucagcaagaguccugu

SEQ ID NO: 2577720 - RNA, 19 nt, Artificial Sequence
  Description of Artificial Sequence: Synthetic oligonucleotide
  Sense strand starting at position 730 of SEQ ID NO: 1889077
uuaccucuccuguagaaag

SEQ ID NO: 2577721 - RNA, 19 nt, Artificial Sequence
  Description of Artificial Sequence: Synthetic oligonucleotide
  Antisense strand to SEQ ID NO: 2577720
cuuucuacaggagagguaa

SEQ ID NO: 2577722 - RNA, 19 nt, Artificial Sequence
  Description of Artificial Sequence: Synthetic oligonucleotide
  Sense strand starting at position 819 of SEQ ID NO: 1889077
ggucucauccagcacucua

SEQ ID NO: 2577723 - RNA, 19 nt, Artificial Sequence
  Description of Artificial Sequence: Synthetic oligonucleotide
  Antisense strand to SEQ ID NO: 2577722
uagagugcuggaugagacc

SEQ ID NO: 2577724 - RNA, 19 nt, Artificial Sequence
  Description of Artificial Sequence: Synthetic oligonucleotide
  Sense strand starting at position 999 of SEQ ID NO: 1889077
gaagaaagaccuugugcca

SEQ ID NO: 2577725 - RNA, 19 nt, Artificial Sequence
  Description of Artificial Sequence: Synthetic oligonucleotide
  Antisense strand to SEQ ID NO: 2577724
uggcacaaggucuuucuuc

SEQ ID NO: 2577726 - RNA, 19 nt, Artificial Sequence
  Description of Artificial Sequence: Synthetic oligonucleotide
  Sense strand starting at position 1037 of SEQ ID NO: 1889077
cgcuauuguguucugagca

SEQ ID NO: 2577727 - RNA, 19 nt, Artificial Sequence
  Description of Artificial Sequence: Synthetic oligonucleotide
  Antisense strand to SEQ ID NO: 2577726
ugcucagaacacaauagcg

SEQ ID NO: 2577728 - RNA, 19 nt, Artificial Sequence
  Description of Artificial Sequence: Synthetic oligonucleotide
  Sense strand starting at position 1045 of SEQ ID NO: 1889077
uguucugagcaaggacaau

SEQ ID NO: 2577729 - RNA, 19 nt, Artificial Sequence
  Description of Artificial Sequence: Synthetic oligonucleotide
  Antisense strand to SEQ ID NO: 2577728
auuguccuugcucagaaca

SEQ ID NO: 2577730 - RNA, 19 nt, Artificial Sequence
  Description of Artificial Sequence: Synthetic oligonucleotide
  Sense strand starting at position 1056 of SEQ ID NO: 1889077
aggacaauaucaucgcuuu

SEQ ID NO: 2577731 - RNA, 19 nt, Artificial Sequence
  Description of Artificial Sequence: Synthetic oligonucleotide
  Antisense strand to SEQ ID NO: 2577730
aaagcgaugauauuguccu

SEQ ID NO: 2577732 - RNA, 19 nt, Artificial Sequence
  Description of Artificial Sequence: Synthetic oligonucleotide
  Sense strand starting at position 1263 of SEQ ID NO: 1889077
gcgagugagugaaaggaaa

SEQ ID NO: 2577733 - RNA, 19 nt, Artificial Sequence
  Description of Artificial Sequence: Synthetic oligonucleotide
  Antisense strand to SEQ ID NO: 2577732
uuuccuuucacucacucgc

SEQ ID NO: 2577734 - RNA, 19 nt, Artificial Sequence
  Description of Artificial Sequence: Synthetic oligonucleotide
  Sense strand starting at position 1410 of SEQ ID NO: 1889077
agguucugaaguugaacaa

SEQ ID NO: 2577735 - RNA, 19 nt, Artificial Sequence
  Description of Artificial Sequence: Synthetic oligonucleotide
  Antisense strand to SEQ ID NO: 2577734
uuguucaacuucagaaccu

SEQ ID NO: 2577736 - RNA, 19 nt, Artificial Sequence
  Description of Artificial Sequence: Synthetic oligonucleotide
  Sense strand starting at position 1503 of SEQ ID NO: 1889077
aaacguguccaugaaugca

SEQ ID NO: 2577737 - RNA, 19 nt, Artificial Sequence
  Description of Artificial Sequence: Synthetic oligonucleotide
  Antisense strand to SEQ ID NO: 2577736
ugcauucauggacacguuu

SEQ ID NO: 2577738 - RNA, 19 nt, Artificial Sequence
  Description of Artificial Sequence: Synthetic oligonucleotide
  Sense strand starting at position 1818 of SEQ ID NO: 1889077
gcacaugauuucuugcuca

SEQ ID NO: 2577739 - RNA, 19 nt, Artificial Sequence
  Description of Artificial Sequence: Synthetic oligonucleotide
  Antisense strand to SEQ ID NO: 2577738
ugagcaagaaaucaugugc

SEQ ID NO: 2577740 - RNA, 19 nt, Artificial Sequence
  Description of Artificial Sequence: Synthetic oligonucleotide
  Sense strand starting at position 2518 of SEQ ID NO: 1889077
uugccagucaauggaagaa

SEQ ID NO: 2577741 - RNA, 19 nt, Artificial Sequence
  Description of Artificial Sequence: Synthetic oligonucleotide
  Antisense strand to SEQ ID NO: 2577740
uucuuccauugacuggcaa

SEQ ID NO: 2577742 - RNA, 19 nt, Artificial Sequence
  Description of Artificial Sequence: Synthetic oligonucleotide
  Sense strand starting at position 2533 of SEQ ID NO: 1889077
agaaguacuguaggaguca

SEQ ID NO: 2577743 - RNA, 19 nt, Artificial Sequence
  Description of Artificial Sequence: Synthetic oligonucleotide
  Antisense strand to SEQ ID NO: 2577742
ugacuccuacaguacuucu

SEQ ID NO: 2577744 - RNA, 19 nt, Artificial Sequence
  Description of Artificial Sequence: Synthetic oligonucleotide
  Sense strand starting at position 2552 of SEQ ID NO: 1889077
ccgggcaaggcagauaaau

SEQ ID NO: 2577745 - RNA, 19 nt, Artificial Sequence
  Description of Artificial Sequence: Synthetic oligonucleotide
  Antisense strand to SEQ ID NO: 2577744
auuuaucugccuugcccgg

SEQ ID NO: 2577746 - RNA, 19 nt, Artificial Sequence
  Description of Artificial Sequence: Synthetic oligonucleotide
  Sense strand starting at position 2667 of SEQ ID NO: 1889077
guaaccugugcagagaaga

SEQ ID NO: 2577747 - RNA, 19 nt, Artificial Sequence
  Description of Artificial Sequence: Synthetic oligonucleotide
  Antisense strand to SEQ ID NO: 2577746
ucuucucugcacagguuac

SEQ ID NO: 2577748 - RNA, 19 nt, Artificial Sequence
  Description of Artificial Sequence: Synthetic oligonucleotide
  Sense strand starting at position 2683 of SEQ ID NO: 1889077
agauguaaauaggucucaa

SEQ ID NO: 2577749 - RNA, 19 nt, Artificial Sequence
  Description of Artificial Sequence: Synthetic oligonucleotide
  Antisense strand to SEQ ID NO: 2577748
uugagaccuauuuacaucu

SEQ ID NO: 2577750 - RNA, 19 nt, Artificial Sequence
  Description of Artificial Sequence: Synthetic oligonucleotide
  Sense strand starting at position 2693 of SEQ ID NO: 1889077
aggucucaagagugacuaa

SEQ ID NO: 2577751 - RNA, 19 nt, Artificial Sequence
  Description of Artificial Sequence: Synthetic oligonucleotide
  Antisense strand to SEQ ID NO: 2577750
uuagucacucuugagaccu

SEQ ID NO: 2577752 - RNA, 19 nt, Artificial Sequence
  Description of Artificial Sequence: Synthetic oligonucleotide
  Sense strand starting at position 2708 of SEQ ID NO: 1889077
cuaagaauuugucagacca

SEQ ID NO: 2577753 - RNA, 19 nt, Artificial Sequence
  Description of Artificial Sequence: Synthetic oligonucleotide
  Antisense strand to SEQ ID NO: 2577752
uggucugacaaauucuuag

SEQ ID NO: 2577754 - RNA, 19 nt, Artificial Sequence
  Description of Artificial Sequence: Synthetic oligonucleotide
  Sense strand starting at position 2738 of SEQ ID NO: 1889077
gggcucuccaggugaggau

SEQ ID NO: 2577755 - RNA, 19 nt, Artificial Sequence
  Description of Artificial Sequence: Synthetic oligonucleotide
  Antisense strand to SEQ ID NO: 2577754
auccucaccuggagagccc

SEQ ID NO: 2577756 - RNA, 19 nt, Artificial Sequence
  Description of Artificial Sequence: Synthetic oligonucleotide
  Sense strand starting at position 2778 of SEQ ID NO: 1889077
ggaugagugguucagagug

SEQ ID NO: 2577757 - RNA, 19 nt, Artificial Sequence
  Description of Artificial Sequence: Synthetic oligonucleotide
  Antisense strand to SEQ ID NO: 2577756
cacucugaaccacucaucc

SEQ ID NO: 2577758 - RNA, 19 nt, Artificial Sequence
  Description of Artificial Sequence: Synthetic oligonucleotide
  Sense strand starting at position 2794 of SEQ ID NO: 1889077
gugccugaaauauagguuu

SEQ ID NO: 2577759 - RNA, 19 nt, Artificial Sequence
  Description of Artificial Sequence: Synthetic oligonucleotide
  Antisense strand to SEQ ID NO: 2577758
aaaccuauauuucaggcac

SEQ ID NO: 2577760 - RNA, 19 nt, Artificial Sequence
  Description of Artificial Sequence: Synthetic oligonucleotide
  Sense strand starting at position 2797 of SEQ ID NO: 1889077
ccugaaauauagguuucuu

SEQ ID NO: 2577761 - RNA, 19 nt, Artificial Sequence
  Description of Artificial Sequence: Synthetic oligonucleotide
  Antisense strand to SEQ ID NO: 2577760
aagaaaccuauauuucagg

SEQ ID NO: 2577762 - RNA, 19 nt, Artificial Sequence
  Description of Artificial Sequence: Synthetic oligonucleotide
  Sense strand starting at position 2812 of SEQ ID NO: 1889077
ucuuauaugagguguagag

SEQ ID NO: 2577763 - RNA, 19 nt, Artificial Sequence
  Description of Artificial Sequence: Synthetic oligonucleotide
  Antisense strand to SEQ ID NO: 2577762
cucuacaccucauauaaga

SEQ ID NO: 2577764 - RNA, 19 nt, Artificial Sequence
  Description of Artificial Sequence: Synthetic oligonucleotide
  Sense strand starting at position 2907 of SEQ ID NO: 1889077
gacuaaaggguuuggacuu

SEQ ID NO: 2577765 - RNA, 19 nt, Artificial Sequence
  Description of Artificial Sequence: Synthetic oligonucleotide
  Antisense strand to SEQ ID NO: 2577764
aaguccaaacccuuuaguc

SEQ ID NO: 2577766 - RNA, 19 nt, Artificial Sequence
  Description of Artificial Sequence: Synthetic oligonucleotide
  Sense strand starting at position 2921 of SEQ ID NO: 1889077
gacuuaauccuguaggcag

SEQ ID NO: 2577767 - RNA, 19 nt, Artificial Sequence
  Description of Artificial Sequence: Synthetic oligonucleotide
  Antisense strand to SEQ ID NO: 2577766
cugccuacaggauuaaguc

SEQ ID NO: 2577768 - RNA, 19 nt, Artificial Sequence
  Description of Artificial Sequence: Synthetic oligonucleotide
  Sense strand starting at position 3004 of SEQ ID NO: 1889077
gcccaagcuggcguguaau

SEQ ID NO: 2577769 - RNA, 19 nt, Artificial Sequence
  Description of Artificial Sequence: Synthetic oligonucleotide
  Antisense strand to SEQ ID NO: 2577768
auuacacgccagcuugggc

SEQ ID NO: 2577770 - RNA, 19 nt, Artificial Sequence
  Description of Artificial Sequence: Synthetic oligonucleotide
  Sense strand starting at position 3389 of SEQ ID NO: 1889077
ggagaaugauuagaggaca

SEQ ID NO: 2577771 - RNA, 19 nt, Artificial Sequence
  Description of Artificial Sequence: Synthetic oligonucleotide
  Antisense strand to SEQ ID NO: 2577770
uguccucuaaucauucucc

SEQ ID NO: 2577772 - RNA, 19 nt, Artificial Sequence
  Description of Artificial Sequence: Synthetic oligonucleotide
  Sense strand starting at position 3657 of SEQ ID NO: 1889077
uuuguaggagcuugagaag

SEQ ID NO: 2577773 - RNA, 19 nt, Artificial Sequence
  Description of Artificial Sequence: Synthetic oligonucleotide
  Antisense strand to SEQ ID NO: 2577772
cuucucaagcuccuacaaa

SEQ ID NO: 2577774 - RNA, 19 nt, Artificial Sequence
  Description of Artificial Sequence: Synthetic oligonucleotide
  Sense strand starting at position 3675 of SEQ ID NO: 1889077
guuuguggaacaugaaucu

SEQ ID NO: 2577775 - RNA, 19 nt, Artificial Sequence
  Description of Artificial Sequence: Synthetic oligonucleotide
  Antisense strand to SEQ ID NO: 2577774
agauucauguuccacaaac

SEQ ID NO: 2577776 - RNA, 19 nt, Artificial Sequence
  Description of Artificial Sequence: Synthetic oligonucleotide
  Sense strand starting at position 3702 of SEQ ID NO: 1889077
ucuggauguccacagugau

SEQ ID NO: 2577777 - RNA, 19 nt, Artificial Sequence
  Description of Artificial Sequence: Synthetic oligonucleotide
  Antisense strand to SEQ ID NO: 2577776
aucacuguggacauccaga

SEQ ID NO: 2577778 - RNA, 19 nt, Artificial Sequence
  Description of Artificial Sequence: Synthetic oligonucleotide
  Sense strand starting at position 3821 of SEQ ID NO: 1889077
uccuauugucuugaagguu

SEQ ID NO: 2577779 - RNA, 19 nt, Artificial Sequence
  Description of Artificial Sequence: Synthetic oligonucleotide
  Antisense strand to SEQ ID NO: 2577778
aaccuucaagacaauagga

SEQ ID NO: 2577780 - RNA, 19 nt, Artificial Sequence
  Description of Artificial Sequence: Synthetic oligonucleotide
  Sense strand starting at position 3879 of SEQ ID NO: 1889077
ugaguugguuagucacaaa

SEQ ID NO: 2577781 - RNA, 19 nt, Artificial Sequence
  Description of Artificial Sequence: Synthetic oligonucleotide
  Antisense strand to SEQ ID NO: 2577780
uuugugacuaaccaacuca

SEQ ID NO: 2577782 - RNA, 19 nt, Artificial Sequence
  Description of Artificial Sequence: Synthetic oligonucleotide
  Sense strand starting at position 3966 of SEQ ID NO: 1889077
cugcguuaagugccugaca

SEQ ID NO: 2577783 - RNA, 19 nt, Artificial Sequence
  Description of Artificial Sequence: Synthetic oligonucleotide
  Antisense strand to SEQ ID NO: 2577782
ugucaggcacuuaacgcag

SEQ ID NO: 2577784 - RNA, 19 nt, Artificial Sequence
  Description of Artificial Sequence: Synthetic oligonucleotide
  Sense strand starting at position 1251 of SEQ ID NO: 1889078
uacauuuccuccgggagac

SEQ ID NO: 2577785 - RNA, 19 nt, Artificial Sequence
  Description of Artificial Sequence: Synthetic oligonucleotide
  Antisense strand to SEQ ID NO: 2577784
gucucccggaggaaaugua

SEQ ID NO: 2577786 - RNA, 19 nt, Artificial Sequence
  Description of Artificial Sequence: Synthetic oligonucleotide
  Sense strand starting at position 2318 of SEQ ID NO: 1889078
ccaagugaacaaugagagu

SEQ ID NO: 2577787 - RNA, 19 nt, Artificial Sequence
  Description of Artificial Sequence: Synthetic oligonucleotide
  Antisense strand to SEQ ID NO: 2577786
acucucauuguucacuugg

SEQ ID NO: 2577788 - RNA, 19 nt, Artificial Sequence
  Description of Artificial Sequence: Synthetic oligonucleotide
  Sense strand starting at position 2329 of SEQ ID NO: 1889078
augagaguuccucaccuuu

SEQ ID NO: 2577789 - RNA, 19 nt, Artificial Sequence
  Description of Artificial Sequence: Synthetic oligonucleotide
  Antisense strand to SEQ ID NO: 2577788
aaaggugaggaacucucau

SEQ ID NO: 2577790 - RNA, 19 nt, Artificial Sequence
  Description of Artificial Sequence: Synthetic oligonucleotide
  Sense strand starting at position 2331 of SEQ ID NO: 1889078
gagaguuccucaccuuugu

SEQ ID NO: 2577791 - RNA, 19 nt, Artificial Sequence
  Description of Artificial Sequence: Synthetic oligonucleotide
  Antisense strand to SEQ ID NO: 2577790
acaaaggugaggaacucuc

SEQ ID NO: 2577792 - RNA, 19 nt, Artificial Sequence
  Description of Artificial Sequence: Synthetic oligonucleotide
  Sense strand starting at position 2440 of SEQ ID NO: 1889078
gugugaaggagguaguagu

SEQ ID NO: 2577793 - RNA, 19 nt, Artificial Sequence
  Description of Artificial Sequence: Synthetic oligonucleotide
  Antisense strand to SEQ ID NO: 2577792
acuacuaccuccuucacac

SEQ ID NO: 2577794 - RNA, 19 nt, Artificial Sequence
  Description of Artificial Sequence: Synthetic oligonucleotide
  Sense strand starting at position 2451 of SEQ ID NO: 1889078
guaguagugugcccauuua

SEQ ID NO: 2577795 - RNA, 19 nt, Artificial Sequence
  Description of Artificial Sequence: Synthetic oligonucleotide
  Antisense strand to SEQ ID NO: 2577794
uaaaugggcacacuacuac

SEQ ID NO: 2577796 - RNA, 19 nt, Artificial Sequence
  Description of Artificial Sequence: Synthetic oligonucleotide
  Sense strand starting at position 2459 of SEQ ID NO: 1889078
gugcccauuuaacaggaaa

SEQ ID NO: 2577797 - RNA, 19 nt, Artificial Sequence
  Description of Artificial Sequence: Synthetic oligonucleotide
  Antisense strand to SEQ ID NO: 2577796
uuuccuguuaaaugggcac

SEQ ID NO: 2577798 - RNA, 19 nt, Artificial Sequence
  Description of Artificial Sequence: Synthetic oligonucleotide
  Sense strand starting at position 2503 of SEQ ID NO: 1889078
uuaggaagugcagaguuaa

SEQ ID NO: 2577799 - RNA, 19 nt, Artificial Sequence
  Description of Artificial Sequence: Synthetic oligonucleotide
  Antisense strand to SEQ ID NO: 2577798
uuaacucugcacuuccuaa

SEQ ID NO: 2577800 - RNA, 19 nt, Artificial Sequence
  Description of Artificial Sequence: Synthetic oligonucleotide
  Sense strand starting at position 2575 of SEQ ID NO: 1889078
cuccucuauucugucagau

SEQ ID NO: 2577801 - RNA, 19 nt, Artificial Sequence
  Description of Artificial Sequence: Synthetic oligonucleotide
  Antisense strand to SEQ ID NO: 2577800
aucugacagaauagaggag

SEQ ID NO: 2577802 - RNA, 19 nt, Artificial Sequence
  Description of Artificial Sequence: Synthetic oligonucleotide
  Sense strand starting at position 2649 of SEQ ID NO: 1889078
uagaauuggugagcaagaa

SEQ ID NO: 2577803 - RNA, 19 nt, Artificial Sequence
  Description of Artificial Sequence: Synthetic oligonucleotide
  Antisense strand to SEQ ID NO: 2577802
uucuugcucaccaauucua

SEQ ID NO: 2577804 - RNA, 19 nt, Artificial Sequence
  Description of Artificial Sequence: Synthetic oligonucleotide
  Sense strand starting at position 2729 of SEQ ID NO: 1889078
gccuguauccugcagcaaa

SEQ ID NO: 2577805 - RNA, 19 nt, Artificial Sequence
  Description of Artificial Sequence: Synthetic oligonucleotide
  Antisense strand to SEQ ID NO: 2577804
uuugcugcaggauacaggc

SEQ ID NO: 2577806 - RNA, 19 nt, Artificial Sequence
  Description of Artificial Sequence: Synthetic oligonucleotide
  Sense strand starting at position 2732 of SEQ ID NO: 1889078
uguauccugcagcaaauaa

SEQ ID NO: 2577807 - RNA, 19 nt, Artificial Sequence
  Description of Artificial Sequence: Synthetic oligonucleotide
  Antisense strand to SEQ ID NO: 2577806
uuauuugcugcaggauaca

SEQ ID NO: 2577808 - RNA, 19 nt, Artificial Sequence
  Description of Artificial Sequence: Synthetic oligonucleotide
  Sense strand starting at position 2772 of SEQ ID NO: 1889078
ccgucuguugcucucuaga

SEQ ID NO: 2577809 - RNA, 19 nt, Artificial Sequence
  Description of Artificial Sequence: Synthetic oligonucleotide
  Antisense strand to SEQ ID NO: 2577808
ucuagagagcaacagacgg

SEQ ID NO: 2577810 - RNA, 19 nt, Artificial Sequence
  Description of Artificial Sequence: Synthetic oligonucleotide
  Sense strand starting at position 2774 of SEQ ID NO: 1889078
gucuguugcucucuagaug

SEQ ID NO: 2577811 - RNA, 19 nt, Artificial Sequence
  Description of Artificial Sequence: Synthetic oligonucleotide
  Antisense strand to SEQ ID NO: 2577810
caucuagagagcaacagac

SEQ ID NO: 2577812 - RNA, 19 nt, Artificial Sequence
  Description of Artificial Sequence: Synthetic oligonucleotide
  Sense strand starting at position 2777 of SEQ ID NO: 1889078
uguugcucucuagaugcua

SEQ ID NO: 2577813 - RNA, 19 nt, Artificial Sequence
  Description of Artificial Sequence: Synthetic oligonucleotide
  Antisense strand to SEQ ID NO: 2577812
uagcaucuagagagcaaca

SEQ ID NO: 2577814 - RNA, 19 nt, Artificial Sequence
  Description of Artificial Sequence: Synthetic oligonucleotide
  Sense strand starting at position 2963 of SEQ ID NO: 1889078
agaggaaacucuucuuggu

SEQ ID NO: 2577815 - RNA, 19 nt, Artificial Sequence
  Description of Artificial Sequence: Synthetic oligonucleotide
  Antisense strand to SEQ ID NO: 2577814
accaagaagaguuuccucu

SEQ ID NO: 2577816 - RNA, 19 nt, Artificial Sequence
  Description of Artificial Sequence: Synthetic oligonucleotide
  Sense strand starting at position 2965 of SEQ ID NO: 1889078
aggaaacucuucuugguac

SEQ ID NO: 2577817 - RNA, 19 nt, Artificial Sequence
  Description of Artificial Sequence: Synthetic oligonucleotide
  Antisense strand to SEQ ID NO: 2577816
guaccaagaagaguuuccu

SEQ ID NO: 2577818 - RNA, 19 nt, Artificial Sequence
  Description of Artificial Sequence: Synthetic oligonucleotide
  Sense strand starting at position 3311 of SEQ ID NO: 1889078
ggugaagagugugauuugu

SEQ ID NO: 2577819 - RNA, 19 nt, Artificial Sequence
  Description of Artificial Sequence: Synthetic oligonucleotide
  Antisense strand to SEQ ID NO: 2577818
acaaaucacacucuucacc

SEQ ID NO: 2577820 - RNA, 19 nt, Artificial Sequence
  Description of Artificial Sequence: Synthetic oligonucleotide
  Sense strand starting at position 3315 of SEQ ID NO: 1889078
aagagugugauuuguaguu

SEQ ID NO: 2577821 - RNA, 19 nt, Artificial Sequence
  Description of Artificial Sequence: Synthetic oligonucleotide
  Antisense strand to SEQ ID NO: 2577820
aacuacaaaucacacucuu

SEQ ID NO: 2577822 - RNA, 19 nt, Artificial Sequence
  Description of Artificial Sequence: Synthetic oligonucleotide
  Sense strand starting at position 3350 of SEQ ID NO: 1889078
uugauucugagguguagag

SEQ ID NO: 2577823 - RNA, 19 nt, Artificial Sequence
  Description of Artificial Sequence: Synthetic oligonucleotide
  Antisense strand to SEQ ID NO: 2577822
cucuacaccucagaaucaa

SEQ ID NO: 2577824 - RNA, 19 nt, Artificial Sequence
  Description of Artificial Sequence: Synthetic oligonucleotide
  Sense strand starting at position 3398 of SEQ ID NO: 1889078
ccacgugaugcugaagguu

SEQ ID NO: 2577825 - RNA, 19 nt, Artificial Sequence
  Description of Artificial Sequence: Synthetic oligonucleotide
  Antisense strand to SEQ ID NO: 2577824
aaccuucagcaucacgugg

SEQ ID NO: 2577826 - RNA, 19 nt, Artificial Sequence
  Description of Artificial Sequence: Synthetic oligonucleotide
  Sense strand starting at position 3401 of SEQ ID NO: 1889078
cgugaugcugaagguuaua

SEQ ID NO: 2577827 - RNA, 19 nt, Artificial Sequence
  Description of Artificial Sequence: Synthetic oligonucleotide
  Antisense strand to SEQ ID NO: 2577826
uauaaccuucagcaucacg

SEQ ID NO: 2577828 - RNA, 19 nt, Artificial Sequence
  Description of Artificial Sequence: Synthetic oligonucleotide
  Sense strand starting at position 3404 of SEQ ID NO: 1889078
gaugcugaagguuauaagu

SEQ ID NO: 2577829 - RNA, 19 nt, Artificial Sequence
  Description of Artificial Sequence: Synthetic oligonucleotide
  Antisense strand to SEQ ID NO: 2577828
acuuauaaccuucagcauc

SEQ ID NO: 2577830 - RNA, 19 nt, Artificial Sequence
  Description of Artificial Sequence: Synthetic oligonucleotide
  Sense strand starting at position 3441 of SEQ ID NO: 1889078
uguaucuguccauggcaua

SEQ ID NO: 2577831 - RNA, 19 nt, Artificial Sequence
  Description of Artificial Sequence: Synthetic oligonucleotide
  Antisense strand to SEQ ID NO: 2577830
uaugccauggacagauaca

SEQ ID NO: 2577832 - RNA, 19 nt, Artificial Sequence
  Description of Artificial Sequence: Synthetic oligonucleotide
  Sense strand starting at position 3442 of SEQ ID NO: 1889078
guaucuguccauggcauau

SEQ ID NO: 2577833 - RNA, 19 nt, Artificial Sequence
  Description of Artificial Sequence: Synthetic oligonucleotide
  Antisense strand to SEQ ID NO: 2577832
auaugccauggacagauac

SEQ ID NO: 2577834 - RNA, 19 nt, Artificial Sequence
  Description of Artificial Sequence: Synthetic oligonucleotide
  Sense strand starting at position 3451 of SEQ ID NO: 1889078
cauggcauaucugucauga

SEQ ID NO: 2577835 - RNA, 19 nt, Artificial Sequence
  Description of Artificial Sequence: Synthetic oligonucleotide
  Antisense strand to SEQ ID NO: 2577834
ucaugacagauaugccaug

SEQ ID NO: 2577836 - RNA, 19 nt, Artificial Sequence
  Description of Artificial Sequence: Synthetic oligonucleotide
  Sense strand starting at position 3501 of SEQ ID NO: 1889078
agguccuuccuggaauugu

SEQ ID NO: 2577837 - RNA, 19 nt, Artificial Sequence
  Description of Artificial Sequence: Synthetic oligonucleotide
  Antisense strand to SEQ ID NO: 2577836
acaauuccaggaaggaccu

SEQ ID NO: 2577838 - RNA, 19 nt, Artificial Sequence
  Description of Artificial Sequence: Synthetic oligonucleotide
  Sense strand starting at position 3509 of SEQ ID NO: 1889078
ccuggaauuguaugcaaag

SEQ ID NO: 2577839 - RNA, 19 nt, Artificial Sequence
  Description of Artificial Sequence: Synthetic oligonucleotide
  Antisense strand to SEQ ID NO: 2577838
cuuugcauacaauuccagg

SEQ ID NO: 2577840 - RNA, 19 nt, Artificial Sequence
  Description of Artificial Sequence: Synthetic oligonucleotide
  Sense strand starting at position 3510 of SEQ ID NO: 1889078
cuggaauuguaugcaaaga

SEQ ID NO: 2577841 - RNA, 19 nt, Artificial Sequence
  Description of Artificial Sequence: Synthetic oligonucleotide
  Antisense strand to SEQ ID NO: 2577840
ucuuugcauacaauuccag

SEQ ID NO: 2577842 - RNA, 19 nt, Artificial Sequence
  Description of Artificial Sequence: Synthetic oligonucleotide
  Sense strand starting at position 3574 of SEQ ID NO: 1889078
ucaaaugggucugucauaa

SEQ ID NO: 2577843 - RNA, 19 nt, Artificial Sequence
  Description of Artificial Sequence: Synthetic oligonucleotide
  Antisense strand to SEQ ID NO: 2577842
uuaugacagacccauuuga

SEQ ID NO: 2577844 - RNA, 19 nt, Artificial Sequence
  Description of Artificial Sequence: Synthetic oligonucleotide
  Sense strand starting at position 3586 of SEQ ID NO: 1889078
gucauaacgucuuccuucu

SEQ ID NO: 2577845 - RNA, 19 nt, Artificial Sequence
  Description of Artificial Sequence: Synthetic oligonucleotide
  Antisense strand to SEQ ID NO: 2577844
agaaggaagacguuaugac

SEQ ID NO: 2577846 - RNA, 19 nt, Artificial Sequence
  Description of Artificial Sequence: Synthetic oligonucleotide
  Sense strand starting at position 3605 of SEQ ID NO: 1889078
ucaagccaugcuugaugaa

SEQ ID NO: 2577847 - RNA, 19 nt, Artificial Sequence
  Description of Artificial Sequence: Synthetic oligonucleotide
  Antisense strand to SEQ ID NO: 2577846
uucaucaagcauggcuuga

SEQ ID NO: 2577848 - RNA, 19 nt, Artificial Sequence
  Description of Artificial Sequence: Synthetic oligonucleotide
  Sense strand starting at position 3621 of SEQ ID NO: 1889078
gaagaagugugagaaauaa

SEQ ID NO: 2577849 - RNA, 19 nt, Artificial Sequence
  Description of Artificial Sequence: Synthetic oligonucleotide
  Antisense strand to SEQ ID NO: 2577848
uuauuucucacacuucuuc

SEQ ID NO: 2577850 - RNA, 19 nt, Artificial Sequence
  Description of Artificial Sequence: Synthetic oligonucleotide
  Sense strand starting at position 3669 of SEQ ID NO: 1889078
agcucucuguugcugauau

SEQ ID NO: 2577851 - RNA, 19 nt, Artificial Sequence
  Description of Artificial Sequence: Synthetic oligonucleotide
  Antisense strand to SEQ ID NO: 2577850
auaucagcaacagagagcu

SEQ ID NO: 2577852 - RNA, 19 nt, Artificial Sequence
  Description of Artificial Sequence: Synthetic oligonucleotide
  Sense strand starting at position 3734 of SEQ ID NO: 1889078
cugugagcucuucagggua

SEQ ID NO: 2577853 - RNA, 19 nt, Artificial Sequence
  Description of Artificial Sequence: Synthetic oligonucleotide
  Antisense strand to SEQ ID NO: 2577852
uacccugaagagcucacag

SEQ ID NO: 2577854 - RNA, 19 nt, Artificial Sequence
  Description of Artificial Sequence: Synthetic oligonucleotide
  Sense strand starting at position 3750 of SEQ ID NO: 1889078
guacuucuccuuugcugga

SEQ ID NO: 2577855 - RNA, 19 nt, Artificial Sequence
  Description of Artificial Sequence: Synthetic oligonucleotide
  Antisense strand to SEQ ID NO: 2577854
uccagcaaaggagaaguac

SEQ ID NO: 2577856 - RNA, 19 nt, Artificial Sequence
  Description of Artificial Sequence: Synthetic oligonucleotide
  Sense strand starting at position 3828 of SEQ ID NO: 1889078
caaagugaauggccaugaa

SEQ ID NO: 2577857 - RNA, 19 nt, Artificial Sequence
  Description of Artificial Sequence: Synthetic oligonucleotide
  Antisense strand to SEQ ID NO: 2577856
uucauggccauucacuuug

SEQ ID NO: 2577858 - RNA, 19 nt, Artificial Sequence
  Description of Artificial Sequence: Synthetic oligonucleotide
  Sense strand starting at position 3893 of SEQ ID NO: 1889078
agguauuacuuccuuuaug

SEQ ID NO: 2577859 - RNA, 19 nt, Artificial Sequence
  Description of Artificial Sequence: Synthetic oligonucleotide
  Antisense strand to SEQ ID NO: 2577858
cauaaaggaaguaauaccu

SEQ ID NO: 2577860 - RNA, 19 nt, Artificial Sequence
  Description of Artificial Sequence: Synthetic oligonucleotide
  Sense strand starting at position 3894 of SEQ ID NO: 1889078
gguauuacuuccuuuaugu

SEQ ID NO: 2577861 - RNA, 19 nt, Artificial Sequence
  Description of Artificial Sequence: Synthetic oligonucleotide
  Antisense strand to SEQ ID NO: 2577860
acauaaaggaaguaauacc

SEQ ID NO: 2577862 - RNA, 19 nt, Artificial Sequence
  Description of Artificial Sequence: Synthetic oligonucleotide
  Sense strand starting at position 3950 of SEQ ID NO: 1889078
gacuccugauguuuagaag

SEQ ID NO: 2577863 - RNA, 19 nt, Artificial Sequence
  Description of Artificial Sequence: Synthetic oligonucleotide
  Antisense strand to SEQ ID NO: 2577862
cuucuaaacaucaggaguc

SEQ ID NO: 2577864 - RNA, 19 nt, Artificial Sequence
  Description of Artificial Sequence: Synthetic oligonucleotide
  Sense strand starting at position 74 of SEQ ID NO: 1889079
cuuaaacgcugauuaucaa

SEQ ID NO: 2577865 - RNA, 19 nt, Artificial Sequence
  Description of Artificial Sequence: Synthetic oligonucleotide
  Antisense strand to SEQ ID NO: 2577864
uugauaaucagcguuuaag

SEQ ID NO: 2577866 - RNA, 19 nt, Artificial Sequence
  Description of Artificial Sequence: Synthetic oligonucleotide
  Sense strand starting at position 75 of SEQ ID NO: 1889079
uuaaacgcugauuaucaau

SEQ ID NO: 2577867 - RNA, 19 nt, Artificial Sequence
  Description of Artificial Sequence: Synthetic oligonucleotide
  Antisense strand to SEQ ID NO: 2577866
auugauaaucagcguuuaa

SEQ ID NO: 2577868 - RNA, 19 nt, Artificial Sequence
  Description of Artificial Sequence: Synthetic oligonucleotide
  Sense strand starting at position 387 of SEQ ID NO: 1889079
auauuaaugugggcacaca

SEQ ID NO: 2577869 - RNA, 19 nt, Artificial Sequence
  Description of Artificial Sequence: Synthetic oligonucleotide
  Antisense strand to SEQ ID NO: 2577868
ugugugcccacauuaauau

SEQ ID NO: 2577870 - RNA, 19 nt, Artificial Sequence
  Description of Artificial Sequence: Synthetic oligonucleotide
  Sense strand starting at position 388 of SEQ ID NO: 1889079
uauuaaugugggcacacaa

SEQ ID NO: 2577871 - RNA, 19 nt, Artificial Sequence
  Description of Artificial Sequence: Synthetic oligonucleotide
  Antisense strand to SEQ ID NO: 2577870
uugugugcccacauuaaua

SEQ ID NO: 2577872 - RNA, 19 nt, Artificial Sequence
  Description of Artificial Sequence: Synthetic oligonucleotide
  Sense strand starting at position 452 of SEQ ID NO: 1889079
uuuaccuuucugugaaaug

SEQ ID NO: 2577873 - RNA, 19 nt, Artificial Sequence
  Description of Artificial Sequence: Synthetic oligonucleotide
  Antisense strand to SEQ ID NO: 2577872
cauuucacagaaagguaaa

SEQ ID NO: 2577874 - RNA, 19 nt, Artificial Sequence
  Description of Artificial Sequence: Synthetic oligonucleotide
  Sense strand starting at position 464 of SEQ ID NO: 1889079
ugaaaugucuuucugugaa

SEQ ID NO: 2577875 - RNA, 19 nt, Artificial Sequence
  Description of Artificial Sequence: Synthetic oligonucleotide
  Antisense strand to SEQ ID NO: 2577874
uucacagaaagacauuuca

SEQ ID NO: 2577876 - RNA, 19 nt, Artificial Sequence
  Description of Artificial Sequence: Synthetic oligonucleotide
  Sense strand starting at position 485 of SEQ ID NO: 1889079
ucuaucacagccugaugua

SEQ ID NO: 2577877 - RNA, 19 nt, Artificial Sequence
  Description of Artificial Sequence: Synthetic oligonucleotide
  Antisense strand to SEQ ID NO: 2577876
uacaucaggcugugauaga

SEQ ID NO: 2577878 - RNA, 19 nt, Artificial Sequence
  Description of Artificial Sequence: Synthetic oligonucleotide
  Sense strand starting at position 486 of SEQ ID NO: 1889079
cuaucacagccugauguaa

SEQ ID NO: 2577879 - RNA, 19 nt, Artificial Sequence
  Description of Artificial Sequence: Synthetic oligonucleotide
  Antisense strand to SEQ ID NO: 2577878
uuacaucaggcugugauag

SEQ ID NO: 2577880 - RNA, 19 nt, Artificial Sequence
  Description of Artificial Sequence: Synthetic oligonucleotide
  Sense strand starting at position 653 of SEQ ID NO: 1889079
gaaagcauuugugauugag

SEQ ID NO: 2577881 - RNA, 19 nt, Artificial Sequence
  Description of Artificial Sequence: Synthetic oligonucleotide
  Antisense strand to SEQ ID NO: 2577880
cucaaucacaaaugcuuuc

SEQ ID NO: 2577882 - RNA, 19 nt, Artificial Sequence
  Description of Artificial Sequence: Synthetic oligonucleotide
  Sense strand starting at position 661 of SEQ ID NO: 1889079
uugugauugagagaugucu

SEQ ID NO: 2577883 - RNA, 19 nt, Artificial Sequence
  Description of Artificial Sequence: Synthetic oligonucleotide
  Antisense strand to SEQ ID NO: 2577882
agacaucucucaaucacaa

SEQ ID NO: 2577884 - RNA, 19 nt, Artificial Sequence
  Description of Artificial Sequence: Synthetic oligonucleotide
  Sense strand starting at position 737 of SEQ ID NO: 1889079
auacguggccucuguauuu

SEQ ID NO: 2577885 - RNA, 19 nt, Artificial Sequence
  Description of Artificial Sequence: Synthetic oligonucleotide
  Antisense strand to SEQ ID NO: 2577884
aaauacagaggccacguau

SEQ ID NO: 2577886 - RNA, 19 nt, Artificial Sequence
  Description of Artificial Sequence: Synthetic oligonucleotide
  Sense strand starting at position 770 of SEQ ID NO: 1889079
ccaguauacuauuugcuuu

SEQ ID NO: 2577887 - RNA, 19 nt, Artificial Sequence
  Description of Artificial Sequence: Synthetic oligonucleotide
  Antisense strand to SEQ ID NO: 2577886
aaagcaaauaguauacugg

SEQ ID NO: 2577888 - RNA, 19 nt, Artificial Sequence
  Description of Artificial Sequence: Synthetic oligonucleotide
  Sense strand starting at position 828 of SEQ ID NO: 1889079
cauuuagugcuguguuaaa

SEQ ID NO: 2577889 - RNA, 19 nt, Artificial Sequence
  Description of Artificial Sequence: Synthetic oligonucleotide
  Antisense strand to SEQ ID NO: 2577888
uuuaacacagcacuaaaug

SEQ ID NO: 2577890 - RNA, 19 nt, Artificial Sequence
  Description of Artificial Sequence: Synthetic oligonucleotide
  Sense strand starting at position 914 of SEQ ID NO: 1889079
aacagaguuuggguuccaa

SEQ ID NO: 2577891 - RNA, 19 nt, Artificial Sequence
  Description of Artificial Sequence: Synthetic oligonucleotide
  Antisense strand to SEQ ID NO: 2577890
uuggaacccaaacucuguu

SEQ ID NO: 2577892 - RNA, 19 nt, Artificial Sequence
  Description of Artificial Sequence: Synthetic oligonucleotide
  Sense strand starting at position 966 of SEQ ID NO: 1889079
cuaaguaaagugcgaaaua

SEQ ID NO: 2577893 - RNA, 19 nt, Artificial Sequence
  Description of Artificial Sequence: Synthetic oligonucleotide
  Antisense strand to SEQ ID NO: 2577892
uauuucgcacuuuacuuag

SEQ ID NO: 2577894 - RNA, 19 nt, Artificial Sequence
  Description of Artificial Sequence: Synthetic oligonucleotide
  Sense strand starting at position 1001 of SEQ ID NO: 1889079
guaagugcuguuuaaucau

SEQ ID NO: 2577895 - RNA, 19 nt, Artificial Sequence
  Description of Artificial Sequence: Synthetic oligonucleotide
  Antisense strand to SEQ ID NO: 2577894
augauuaaacagcacuuac

SEQ ID NO: 2577896 - RNA, 19 nt, Artificial Sequence
  Description of Artificial Sequence: Synthetic oligonucleotide
  Sense strand starting at position 1103 of SEQ ID NO: 1889079
uugggcuccucucuauuaa

SEQ ID NO: 2577897 - RNA, 19 nt, Artificial Sequence
  Description of Artificial Sequence: Synthetic oligonucleotide
  Antisense strand to SEQ ID NO: 2577896
uuaauagagaggagcccaa

SEQ ID NO: 2577898 - RNA, 19 nt, Artificial Sequence
  Description of Artificial Sequence: Synthetic oligonucleotide
  Sense strand starting at position 1154 of SEQ ID NO: 1889079
ugacaccagucuuacauuu

SEQ ID NO: 2577899 - RNA, 19 nt, Artificial Sequence
  Description of Artificial Sequence: Synthetic oligonucleotide
  Antisense strand to SEQ ID NO: 2577898
aaauguaagacugguguca

SEQ ID NO: 2577900 - RNA, 19 nt, Artificial Sequence
  Description of Artificial Sequence: Synthetic oligonucleotide
  Sense strand starting at position 1178 of SEQ ID NO: 1889079
gcucccaagcucugaaaca

SEQ ID NO: 2577901 - RNA, 19 nt, Artificial Sequence
  Description of Artificial Sequence: Synthetic oligonucleotide
  Antisense strand to SEQ ID NO: 2577900
uguuucagagcuugggagc

SEQ ID NO: 2577902 - RNA, 19 nt, Artificial Sequence
  Description of Artificial Sequence: Synthetic oligonucleotide
  Sense strand starting at position 1187 of SEQ ID NO: 1889079
cucugaaacacggguacau

SEQ ID NO: 2577903 - RNA, 19 nt, Artificial Sequence
  Description of Artificial Sequence: Synthetic oligonucleotide
  Antisense strand to SEQ ID NO: 2577902
auguacccguguuucagag

SEQ ID NO: 2577904 - RNA, 19 nt, Artificial Sequence
  Description of Artificial Sequence: Synthetic oligonucleotide
  Sense strand starting at position 1229 of SEQ ID NO: 1889079
guucuuugcaacgugcgaa

SEQ ID NO: 2577905 - RNA, 19 nt, Artificial Sequence
  Description of Artificial Sequence: Synthetic oligonucleotide
  Antisense strand to SEQ ID NO: 2577904
uucgcacguugcaaagaac

SEQ ID NO: 2577906 - RNA, 19 nt, Artificial Sequence
  Description of Artificial Sequence: Synthetic oligonucleotide
  Sense strand starting at position 1345 of SEQ ID NO: 1889079
guaggugcucuagggauaa

SEQ ID NO: 2577907 - RNA, 19 nt, Artificial Sequence
  Description of Artificial Sequence: Synthetic oligonucleotide
  Antisense strand to SEQ ID NO: 2577906
uuaucccuagagcaccuac

SEQ ID NO: 2577908 - RNA, 19 nt, Artificial Sequence
  Description of Artificial Sequence: Synthetic oligonucleotide
  Sense strand starting at position 2624 of SEQ ID NO: 1889079
aggcggugucuggagagaa

SEQ ID NO: 2577909 - RNA, 19 nt, Artificial Sequence
  Description of Artificial Sequence: Synthetic oligonucleotide
  Antisense strand to SEQ ID NO: 2577908
uucucuccagacaccgccu

SEQ ID NO: 2577910 - RNA, 19 nt, Artificial Sequence
  Description of Artificial Sequence: Synthetic oligonucleotide
  Sense strand starting at position 3160 of SEQ ID NO: 1889079
aauaaagauugaugggaaa

SEQ ID NO: 2577911 - RNA, 19 nt, Artificial Sequence
  Description of Artificial Sequence: Synthetic oligonucleotide
  Antisense strand to SEQ ID NO: 2577910
uuucccaucaaucuuuauu

SEQ ID NO: 2577912 - RNA, 19 nt, Artificial Sequence
  Description of Artificial Sequence: Synthetic oligonucleotide
  Sense strand starting at position 3244 of SEQ ID NO: 1889079
uuugaaucauucguacuca

SEQ ID NO: 2577913 - RNA, 19 nt, Artificial Sequence
  Description of Artificial Sequence: Synthetic oligonucleotide
  Antisense strand to SEQ ID NO: 2577912
ugaguacgaaugauucaaa

SEQ ID NO: 2577914 - RNA, 19 nt, Artificial Sequence
  Description of Artificial Sequence: Synthetic oligonucleotide
  Sense strand starting at position 3258 of SEQ ID NO: 1889079
acucauuuauguggaaaca

SEQ ID NO: 2577915 - RNA, 19 nt, Artificial Sequence
  Description of Artificial Sequence: Synthetic oligonucleotide
  Antisense strand to SEQ ID NO: 2577914
uguuuccacauaaaugagu

SEQ ID NO: 2577916 - RNA, 19 nt, Artificial Sequence
  Description of Artificial Sequence: Synthetic oligonucleotide
  Sense strand starting at position 3303 of SEQ ID NO: 1889079
ugaucuguuggugguauuu

SEQ ID NO: 2577917 - RNA, 19 nt, Artificial Sequence
  Description of Artificial Sequence: Synthetic oligonucleotide
  Antisense strand to SEQ ID NO: 2577916
aaauaccaccaacagauca

SEQ ID NO: 2577918 - RNA, 19 nt, Artificial Sequence
  Description of Artificial Sequence: Synthetic oligonucleotide
  Sense strand starting at position 3374 of SEQ ID NO: 1889079
cuuaguguggugcauauuu

SEQ ID NO: 2577919 - RNA, 19 nt, Artificial Sequence
  Description of Artificial Sequence: Synthetic oligonucleotide
  Antisense strand to SEQ ID NO: 2577918
aaauaugcaccacacuaag

SEQ ID NO: 2577920 - RNA, 19 nt, Artificial Sequence
  Description of Artificial Sequence: Synthetic oligonucleotide
  Sense strand starting at position 3376 of SEQ ID NO: 1889079
uaguguggugcauauuuau

SEQ ID NO: 2577921 - RNA, 19 nt, Artificial Sequence
  Description of Artificial Sequence: Synthetic oligonucleotide
  Antisense strand to SEQ ID NO: 2577920
auaaauaugcaccacacua

SEQ ID NO: 2577922 - RNA, 19 nt, Artificial Sequence
  Description of Artificial Sequence: Synthetic oligonucleotide
  Sense strand starting at position 3382 of SEQ ID NO: 1889079
ggugcauauuuauugugca

SEQ ID NO: 2577923 - RNA, 19 nt, Artificial Sequence
  Description of Artificial Sequence: Synthetic oligonucleotide
  Antisense strand to SEQ ID NO: 2577922
ugcacaauaaauaugcacc

SEQ ID NO: 2577924 - RNA, 19 nt, Artificial Sequence
  Description of Artificial Sequence: Synthetic oligonucleotide
  Sense strand starting at position 3395 of SEQ ID NO: 1889079
ugugcauuugccugucaug

SEQ ID NO: 2577925 - RNA, 19 nt, Artificial Sequence
  Description of Artificial Sequence: Synthetic oligonucleotide
  Antisense strand to SEQ ID NO: 2577924
caugacaggcaaaugcaca

SEQ ID NO: 2577926 - RNA, 19 nt, Artificial Sequence
  Description of Artificial Sequence: Synthetic oligonucleotide
  Sense strand starting at position 3406 of SEQ ID NO: 1889079
cugucaugguauuucgauu

SEQ ID NO: 2577927 - RNA, 19 nt, Artificial Sequence
  Description of Artificial Sequence: Synthetic oligonucleotide
  Antisense strand to SEQ ID NO: 2577926
aaucgaaauaccaugacag

SEQ ID NO: 2577928 - RNA, 19 nt, Artificial Sequence
  Description of Artificial Sequence: Synthetic oligonucleotide
  Sense strand starting at position 3486 of SEQ ID NO: 1889079
ugugcaacuuucuugauaa

SEQ ID NO: 2577929 - RNA, 19 nt, Artificial Sequence
  Description of Artificial Sequence: Synthetic oligonucleotide
  Antisense strand to SEQ ID NO: 2577928
uuaucaagaaaguugcaca

SEQ ID NO: 2577930 - RNA, 19 nt, Artificial Sequence
  Description of Artificial Sequence: Synthetic oligonucleotide
  Sense strand starting at position 3620 of SEQ ID NO: 1889079
ggugaaaugcaguaaagug

SEQ ID NO: 2577931 - RNA, 19 nt, Artificial Sequence
  Description of Artificial Sequence: Synthetic oligonucleotide
  Antisense strand to SEQ ID NO: 2577930
cacuuuacugcauuucacc

SEQ ID NO: 2577932 - RNA, 19 nt, Artificial Sequence
  Description of Artificial Sequence: Synthetic oligonucleotide
  Sense strand starting at position 3630 of SEQ ID NO: 1889079
aguaaagugagagguacaa

SEQ ID NO: 2577933 - RNA, 19 nt, Artificial Sequence
  Description of Artificial Sequence: Synthetic oligonucleotide
  Antisense strand to SEQ ID NO: 2577932
uuguaccucucacuuuacu

SEQ ID NO: 2577934 - RNA, 19 nt, Artificial Sequence
  Description of Artificial Sequence: Synthetic oligonucleotide
  Sense strand starting at position 3675 of SEQ ID NO: 1889079
caagguugccauuggagga

SEQ ID NO: 2577935 - RNA, 19 nt, Artificial Sequence
  Description of Artificial Sequence: Synthetic oligonucleotide
  Antisense strand to SEQ ID NO: 2577934
uccuccaauggcaaccuug

SEQ ID NO: 2577936 - RNA, 19 nt, Artificial Sequence
  Description of Artificial Sequence: Synthetic oligonucleotide
  Sense strand starting at position 3706 of SEQ ID NO: 1889079
ggguuccugaaguauuaau

SEQ ID NO: 2577937 - RNA, 19 nt, Artificial Sequence
  Description of Artificial Sequence: Synthetic oligonucleotide
  Antisense strand to SEQ ID NO: 2577936
auuaauacuucaggaaccc

SEQ ID NO: 2577938 - RNA, 19 nt, Artificial Sequence
  Description of Artificial Sequence: Synthetic oligonucleotide
  Sense strand starting at position 3716 of SEQ ID NO: 1889079
aguauuaauagguggcauu

SEQ ID NO: 2577939 - RNA, 19 nt, Artificial Sequence
  Description of Artificial Sequence: Synthetic oligonucleotide
  Antisense strand to SEQ ID NO: 2577938
aaugccaccuauuaauacu

SEQ ID NO: 2577940 - RNA, 19 nt, Artificial Sequence
  Description of Artificial Sequence: Synthetic oligonucleotide
  Sense strand starting at position 3762 of SEQ ID NO: 1889079
gacuuuguuagguagaggu

SEQ ID NO: 2577941 - RNA, 19 nt, Artificial Sequence
  Description of Artificial Sequence: Synthetic oligonucleotide
  Antisense strand to SEQ ID NO: 2577940
accucuaccuaacaaaguc

SEQ ID NO: 2577942 - RNA, 19 nt, Artificial Sequence
  Description of Artificial Sequence: Synthetic oligonucleotide
  Sense strand starting at position 3794 of SEQ ID NO: 1889079
ggacguuucaagggugaag

SEQ ID NO: 2577943 - RNA, 19 nt, Artificial Sequence
  Description of Artificial Sequence: Synthetic oligonucleotide
  Antisense strand to SEQ ID NO: 2577942
cuucacccuugaaacgucc

SEQ ID NO: 2577944 - RNA, 19 nt, Artificial Sequence
  Description of Artificial Sequence: Synthetic oligonucleotide
  Sense strand starting at position 113 of SEQ ID NO: 1889080
gucauuaaaugcuuuauag

SEQ ID NO: 2577945 - RNA, 19 nt, Artificial Sequence
  Description of Artificial Sequence: Synthetic oligonucleotide
  Antisense strand to SEQ ID NO: 2577944
cuauaaagcauuuaaugac

SEQ ID NO: 2577946 - RNA, 19 nt, Artificial Sequence
  Description of Artificial Sequence: Synthetic oligonucleotide
  Sense strand starting at position 141 of SEQ ID NO: 1889080
gugaauuuauuugggcaug

SEQ ID NO: 2577947 - RNA, 19 nt, Artificial Sequence
  Description of Artificial Sequence: Synthetic oligonucleotide
  Antisense strand to SEQ ID NO: 2577946
caugcccaaauaaauucac

SEQ ID NO: 2577948 - RNA, 19 nt, Artificial Sequence
  Description of Artificial Sequence: Synthetic oligonucleotide
  Sense strand starting at position 172 of SEQ ID NO: 1889080
aaggguaucucuuugucau

SEQ ID NO: 2577949 - RNA, 19 nt, Artificial Sequence
  Description of Artificial Sequence: Synthetic oligonucleotide
  Antisense strand to SEQ ID NO: 2577948
augacaaagagauacccuu

SEQ ID NO: 2577950 - RNA, 19 nt, Artificial Sequence
  Description of Artificial Sequence: Synthetic oligonucleotide
  Sense strand starting at position 546 of SEQ ID NO: 1889080
cauuuagauugagauauug

SEQ ID NO: 2577951 - RNA, 19 nt, Artificial Sequence
  Description of Artificial Sequence: Synthetic oligonucleotide
  Antisense strand to SEQ ID NO: 2577950
caauaucucaaucuaaaug

SEQ ID NO: 2577952 - RNA, 19 nt, Artificial Sequence
  Description of Artificial Sequence: Synthetic oligonucleotide
  Sense strand starting at position 620 of SEQ ID NO: 1889080
guauuuccucaagguucuu

SEQ ID NO: 2577953 - RNA, 19 nt, Artificial Sequence
  Description of Artificial Sequence: Synthetic oligonucleotide
  Antisense strand to SEQ ID NO: 2577952
aagaaccuugaggaaauac

SEQ ID NO: 2577954 - RNA, 19 nt, Artificial Sequence
  Description of Artificial Sequence: Synthetic oligonucleotide
  Sense strand starting at position 657 of SEQ ID NO: 1889080
uggguaaaguagucucaug

SEQ ID NO: 2577955 - RNA, 19 nt, Artificial Sequence
  Description of Artificial Sequence: Synthetic oligonucleotide
  Antisense strand to SEQ ID NO: 2577954
caugagacuacuuuaccca

SEQ ID NO: 2577956 - RNA, 19 nt, Artificial Sequence
  Description of Artificial Sequence: Synthetic oligonucleotide
  Sense strand starting at position 712 of SEQ ID NO: 1889080
auaguucucauagagugua

SEQ ID NO: 2577957 - RNA, 19 nt, Artificial Sequence
  Description of Artificial Sequence: Synthetic oligonucleotide
  Antisense strand to SEQ ID NO: 2577956
uacacucuaugagaacuau

SEQ ID NO: 2577958 - RNA, 19 nt, Artificial Sequence
  Description of Artificial Sequence: Synthetic oligonucleotide
  Sense strand starting at position 715 of SEQ ID NO: 1889080
guucucauagaguguauuu

SEQ ID NO: 2577959 - RNA, 19 nt, Artificial Sequence
  Description of Artificial Sequence: Synthetic oligonucleotide
  Antisense strand to SEQ ID NO: 2577958
aaauacacucuaugagaac

SEQ ID NO: 2577960 - RNA, 19 nt, Artificial Sequence
  Description of Artificial Sequence: Synthetic oligonucleotide
  Sense strand starting at position 944 of SEQ ID NO: 1889080
cucuuucugguuuauuaua

SEQ ID NO: 2577961 - RNA, 19 nt, Artificial Sequence
  Description of Artificial Sequence: Synthetic oligonucleotide
  Antisense strand to SEQ ID NO: 2577960
uauaauaaaccagaaagag

SEQ ID NO: 2577962 - RNA, 19 nt, Artificial Sequence
  Description of Artificial Sequence: Synthetic oligonucleotide
  Sense strand starting at position 961 of SEQ ID NO: 1889080
uagguauauuuggauuaug

SEQ ID NO: 2577963 - RNA, 19 nt, Artificial Sequence
  Description of Artificial Sequence: Synthetic oligonucleotide
  Antisense strand to SEQ ID NO: 2577962
cauaauccaaauauaccua

SEQ ID NO: 2577964 - RNA, 19 nt, Artificial Sequence
  Description of Artificial Sequence: Synthetic oligonucleotide
  Sense strand starting at position 1002 of SEQ ID NO: 1889080
uagacauugugguccaauc

SEQ ID NO: 2577965 - RNA, 19 nt, Artificial Sequence
  Description of Artificial Sequence: Synthetic oligonucleotide
  Antisense strand to SEQ ID NO: 2577964
gauuggaccacaaugucua

SEQ ID NO: 2577966 - RNA, 19 nt, Artificial Sequence
  Description of Artificial Sequence: Synthetic oligonucleotide
  Sense strand starting at position 1018 of SEQ ID NO: 1889080
aucugagaguauucuguuu

SEQ ID NO: 2577967 - RNA, 19 nt, Artificial Sequence
  Description of Artificial Sequence: Synthetic oligonucleotide
  Antisense strand to SEQ ID NO: 2577966
aaacagaauacucucagau

SEQ ID NO: 2577968 - RNA, 19 nt, Artificial Sequence
  Description of Artificial Sequence: Synthetic oligonucleotide
  Sense strand starting at position 1069 of SEQ ID NO: 1889080
uuuguuugucaguauaaca

SEQ ID NO: 2577969 - RNA, 19 nt, Artificial Sequence
  Description of Artificial Sequence: Synthetic oligonucleotide
  Antisense strand to SEQ ID NO: 2577968
uguuauacugacaaacaaa

SEQ ID NO: 2577970 - RNA, 19 nt, Artificial Sequence
  Description of Artificial Sequence: Synthetic oligonucleotide
  Sense strand starting at position 1213 of SEQ ID NO: 1889080
uuuguuccaggguauaaca

SEQ ID NO: 2577971 - RNA, 19 nt, Artificial Sequence
  Description of Artificial Sequence: Synthetic oligonucleotide
  Antisense strand to SEQ ID NO: 2577970
uguuauacccuggaacaaa

SEQ ID NO: 2577972 - RNA, 19 nt, Artificial Sequence
  Description of Artificial Sequence: Synthetic oligonucleotide
  Sense strand starting at position 1258 of SEQ ID NO: 1889080
ucaggaagcuaagcauaau

SEQ ID NO: 2577973 - RNA, 19 nt, Artificial Sequence
  Description of Artificial Sequence: Synthetic oligonucleotide
  Antisense strand to SEQ ID NO: 2577972
auuaugcuuagcuuccuga

SEQ ID NO: 2577974 - RNA, 19 nt, Artificial Sequence
  Description of Artificial Sequence: Synthetic oligonucleotide
  Sense strand starting at position 1300 of SEQ ID NO: 1889080
cccauaauaccuggaaggu

SEQ ID NO: 2577975 - RNA, 19 nt, Artificial Sequence
  Description of Artificial Sequence: Synthetic oligonucleotide
  Antisense strand to SEQ ID NO: 2577974
accuuccagguauuauggg

SEQ ID NO: 2577976 - RNA, 19 nt, Artificial Sequence
  Description of Artificial Sequence: Synthetic oligonucleotide
  Sense strand starting at position 1319 of SEQ ID NO: 1889080
gggaguuuaagcugcaaag

SEQ ID NO: 2577977 - RNA, 19 nt, Artificial Sequence
  Description of Artificial Sequence: Synthetic oligonucleotide
  Antisense strand to SEQ ID NO: 2577976
cuuugcagcuuaaacuccc

SEQ ID NO: 2577978 - RNA, 19 nt, Artificial Sequence
  Description of Artificial Sequence: Synthetic oligonucleotide
  Sense strand starting at position 1321 of SEQ ID NO: 1889080
gaguuuaagcugcaaagaa

SEQ ID NO: 2577979 - RNA, 19 nt, Artificial Sequence
  Description of Artificial Sequence: Synthetic oligonucleotide
  Antisense strand to SEQ ID NO: 2577978
uucuuugcagcuuaaacuc

SEQ ID NO: 2577980 - RNA, 19 nt, Artificial Sequence
  Description of Artificial Sequence: Synthetic oligonucleotide
  Sense strand starting at position 1349 of SEQ ID NO: 1889080
uaggccaguggcuauaaau

SEQ ID NO: 2577981 - RNA, 19 nt, Artificial Sequence
  Description of Artificial Sequence: Synthetic oligonucleotide
  Antisense strand to SEQ ID NO: 2577980
auuuauagccacuggccua

SEQ ID NO: 2577982 - RNA, 19 nt, Artificial Sequence
  Description of Artificial Sequence: Synthetic oligonucleotide
  Sense strand starting at position 1412 of SEQ ID NO: 1889080
gauggaugauucccuuauc

SEQ ID NO: 2577983 - RNA, 19 nt, Artificial Sequence
  Description of Artificial Sequence: Synthetic oligonucleotide
  Antisense strand to SEQ ID NO: 2577982
gauaagggaaucauccauc

SEQ ID NO: 2577984 - RNA, 19 nt, Artificial Sequence
  Description of Artificial Sequence: Synthetic oligonucleotide
  Sense strand starting at position 1415 of SEQ ID NO: 1889080
ggaugauucccuuaucguu

SEQ ID NO: 2577985 - RNA, 19 nt, Artificial Sequence
  Description of Artificial Sequence: Synthetic oligonucleotide
  Antisense strand to SEQ ID NO: 2577984
aacgauaagggaaucaucc

SEQ ID NO: 2577986 - RNA, 19 nt, Artificial Sequence
  Description of Artificial Sequence: Synthetic oligonucleotide
  Sense strand starting at position 1422 of SEQ ID NO: 1889080
ucccuuaucguuuaucuca

SEQ ID NO: 2577987 - RNA, 19 nt, Artificial Sequence
  Description of Artificial Sequence: Synthetic oligonucleotide
  Antisense strand to SEQ ID NO: 2577986
ugagauaaacgauaaggga

SEQ ID NO: 2577988 - RNA, 19 nt, Artificial Sequence
  Description of Artificial Sequence: Synthetic oligonucleotide
  Sense strand starting at position 1630 of SEQ ID NO: 1889080
acugaacacuucgugaauc

SEQ ID NO: 2577989 - RNA, 19 nt, Artificial Sequence
  Description of Artificial Sequence: Synthetic oligonucleotide
  Antisense strand to SEQ ID NO: 2577988
gauucacgaaguguucagu

SEQ ID NO: 2577990 - RNA, 19 nt, Artificial Sequence
  Description of Artificial Sequence: Synthetic oligonucleotide
  Sense strand starting at position 1632 of SEQ ID NO: 1889080
ugaacacuucgugaaucuu

SEQ ID NO: 2577991 - RNA, 19 nt, Artificial Sequence
  Description of Artificial Sequence: Synthetic oligonucleotide
  Antisense strand to SEQ ID NO: 2577990
aagauucacgaaguguuca

SEQ ID NO: 2577992 - RNA, 19 nt, Artificial Sequence
  Description of Artificial Sequence: Synthetic oligonucleotide
  Sense strand starting at position 2079 of SEQ ID NO: 1889080
ugggauuagugaccuaaua

SEQ ID NO: 2577993 - RNA, 19 nt, Artificial Sequence
  Description of Artificial Sequence: Synthetic oligonucleotide
  Antisense strand to SEQ ID NO: 2577992
uauuaggucacuaauccca

SEQ ID NO: 2577994 - RNA, 19 nt, Artificial Sequence
  Description of Artificial Sequence: Synthetic oligonucleotide
  Sense strand starting at position 2212 of SEQ ID NO: 1889080
uuggauuugucagccucua

SEQ ID NO: 2577995 - RNA, 19 nt, Artificial Sequence
  Description of Artificial Sequence: Synthetic oligonucleotide
  Antisense strand to SEQ ID NO: 2577994
uagaggcugacaaauccaa

SEQ ID NO: 2577996 - RNA, 19 nt, Artificial Sequence
  Description of Artificial Sequence: Synthetic oligonucleotide
  Sense strand starting at position 2348 of SEQ ID NO: 1889080
cgagcuucugcggucugau

SEQ ID NO: 2577997 - RNA, 19 nt, Artificial Sequence
  Description of Artificial Sequence: Synthetic oligonucleotide
  Antisense strand to SEQ ID NO: 2577996
aucagaccgcagaagcucg

SEQ ID NO: 2577998 - RNA, 19 nt, Artificial Sequence
  Description of Artificial Sequence: Synthetic oligonucleotide
  Sense strand starting at position 2357 of SEQ ID NO: 1889080
gcggucugauuuccuguga

SEQ ID NO: 2577999 - RNA, 19 nt, Artificial Sequence
  Description of Artificial Sequence: Synthetic oligonucleotide
  Antisense strand to SEQ ID NO: 2577998
ucacaggaaaucagaccgc

SEQ ID NO: 2578000 - RNA, 19 nt, Artificial Sequence
  Description of Artificial Sequence: Synthetic oligonucleotide
  Sense strand starting at position 2358 of SEQ ID NO: 1889080
cggucugauuuccugugaa

SEQ ID NO: 2578001 - RNA, 19 nt, Artificial Sequence
  Description of Artificial Sequence: Synthetic oligonucleotide
  Antisense strand to SEQ ID NO: 2578000
uucacaggaaaucagaccg

SEQ ID NO: 2578002 - RNA, 19 nt, Artificial Sequence
  Description of Artificial Sequence: Synthetic oligonucleotide
  Sense strand starting at position 2430 of SEQ ID NO: 1889080
cagaguguggauggacauu

SEQ ID NO: 2578003 - RNA, 19 nt, Artificial Sequence
  Description of Artificial Sequence: Synthetic oligonucleotide
  Antisense strand to SEQ ID NO: 2578002
aauguccauccacacucug

SEQ ID NO: 2578004 - RNA, 19 nt, Artificial Sequence
  Description of Artificial Sequence: Synthetic oligonucleotide
  Sense strand starting at position 3149 of SEQ ID NO: 1889080
uugaguauucuacagugaa

SEQ ID NO: 2578005 - RNA, 19 nt, Artificial Sequence
  Description of Artificial Sequence: Synthetic oligonucleotide
  Antisense strand to SEQ ID NO: 2578004
uucacuguagaauacucaa

SEQ ID NO: 2578006 - RNA, 19 nt, Artificial Sequence
  Description of Artificial Sequence: Synthetic oligonucleotide
  Sense strand starting at position 3152 of SEQ ID NO: 1889080
aguauucuacagugaacaa

SEQ ID NO: 2578007 - RNA, 19 nt, Artificial Sequence
  Description of Artificial Sequence: Synthetic oligonucleotide
  Antisense strand to SEQ ID NO: 2578006
uuguucacuguagaauacu

SEQ ID NO: 2578008 - RNA, 19 nt, Artificial Sequence
  Description of Artificial Sequence: Synthetic oligonucleotide
  Sense strand starting at position 3280 of SEQ ID NO: 1889080
ucauccucuggugaugaau

SEQ ID NO: 2578009 - RNA, 19 nt, Artificial Sequence
  Description of Artificial Sequence: Synthetic oligonucleotide
  Antisense strand to SEQ ID NO: 2578008
auucaucaccagaggauga

SEQ ID NO: 2578010 - RNA, 19 nt, Artificial Sequence
  Description of Artificial Sequence: Synthetic oligonucleotide
  Sense strand starting at position 3286 of SEQ ID NO: 1889080
ucuggugaugaaugaaagu

SEQ ID NO: 2578011 - RNA, 19 nt, Artificial Sequence
  Description of Artificial Sequence: Synthetic oligonucleotide
  Antisense strand to SEQ ID NO: 2578010
acuuucauucaucaccaga

SEQ ID NO: 2578012 - RNA, 19 nt, Artificial Sequence
  Description of Artificial Sequence: Synthetic oligonucleotide
  Sense strand starting at position 3324 of SEQ ID NO: 1889080
aggaaucaccuguggaugu

SEQ ID NO: 2578013 - RNA, 19 nt, Artificial Sequence
  Description of Artificial Sequence: Synthetic oligonucleotide
  Antisense strand to SEQ ID NO: 2578012
acauccacaggugauuccu

SEQ ID NO: 2578014 - RNA, 19 nt, Artificial Sequence
  Description of Artificial Sequence: Synthetic oligonucleotide
  Sense strand starting at position 3362 of SEQ ID NO: 1889080
ucaauaauagggugccauu

SEQ ID NO: 2578015 - RNA, 19 nt, Artificial Sequence
  Description of Artificial Sequence: Synthetic oligonucleotide
  Antisense strand to SEQ ID NO: 2578014
aauggcacccuauuauuga

SEQ ID NO: 2578016 - RNA, 19 nt, Artificial Sequence
  Description of Artificial Sequence: Synthetic oligonucleotide
  Sense strand starting at position 3455 of SEQ ID NO: 1889080
agcccugagccagaggauu

SEQ ID NO: 2578017 - RNA, 19 nt, Artificial Sequence
  Description of Artificial Sequence: Synthetic oligonucleotide
  Antisense strand to SEQ ID NO: 2578016
aauccucuggcucagggcu

SEQ ID NO: 2578018 - RNA, 19 nt, Artificial Sequence
  Description of Artificial Sequence: Synthetic oligonucleotide
  Sense strand starting at position 3505 of SEQ ID NO: 1889080
ucacaucuccaguguauca

SEQ ID NO: 2578019 - RNA, 19 nt, Artificial Sequence
  Description of Artificial Sequence: Synthetic oligonucleotide
  Antisense strand to SEQ ID NO: 2578018
ugauacacuggagauguga

SEQ ID NO: 2578020 - RNA, 19 nt, Artificial Sequence
  Description of Artificial Sequence: Synthetic oligonucleotide
  Sense strand starting at position 3570 of SEQ ID NO: 1889080
acccaagaugccugagaga

SEQ ID NO: 2578021 - RNA, 19 nt, Artificial Sequence
  Description of Artificial Sequence: Synthetic oligonucleotide
  Antisense strand to SEQ ID NO: 2578020
ucucucaggcaucuugggu

SEQ ID NO: 2578022 - RNA, 19 nt, Artificial Sequence
  Description of Artificial Sequence: Synthetic oligonucleotide
  Sense strand starting at position 3596 of SEQ ID NO: 1889080
auaaauccacuuuggugua

SEQ ID NO: 2578023 - RNA, 19 nt, Artificial Sequence
  Description of Artificial Sequence: Synthetic oligonucleotide
  Antisense strand to SEQ ID NO: 2578022
uacaccaaaguggauuuau

SEQ ID NO: 2578024 - RNA, 19 nt, Artificial Sequence
  Description of Artificial Sequence: Synthetic oligonucleotide
  Sense strand starting at position 1069 of SEQ ID NO: 1889081
ggaaauuaaauacgugucu

SEQ ID NO: 2578025 - RNA, 19 nt, Artificial Sequence
  Description of Artificial Sequence: Synthetic oligonucleotide
  Antisense strand to SEQ ID NO: 2578024
agacacguauuuaauuucc

SEQ ID NO: 2578026 - RNA, 19 nt, Artificial Sequence
  Description of Artificial Sequence: Synthetic oligonucleotide
  Sense strand starting at position 1074 of SEQ ID NO: 1889081
uuaaauacgugucugauag

SEQ ID NO: 2578027 - RNA, 19 nt, Artificial Sequence
  Description of Artificial Sequence: Synthetic oligonucleotide
  Antisense strand to SEQ ID NO: 2578026
cuaucagacacguauuuaa

SEQ ID NO: 2578028 - RNA, 19 nt, Artificial Sequence
  Description of Artificial Sequence: Synthetic oligonucleotide
  Sense strand starting at position 1075 of SEQ ID NO: 1889081
uaaauacgugucugauaga

SEQ ID NO: 2578029 - RNA, 19 nt, Artificial Sequence
  Description of Artificial Sequence: Synthetic oligonucleotide
  Antisense strand to SEQ ID NO: 2578028
ucuaucagacacguauuua

SEQ ID NO: 2578030 - RNA, 19 nt, Artificial Sequence
  Description of Artificial Sequence: Synthetic oligonucleotide
  Sense strand starting at position 1080 of SEQ ID NO: 1889081
acgugucugauagauuaca

SEQ ID NO: 2578031 - RNA, 19 nt, Artificial Sequence
  Description of Artificial Sequence: Synthetic oligonucleotide
  Antisense strand to SEQ ID NO: 2578030
uguaaucuaucagacacgu

SEQ ID NO: 2578032 - RNA, 19 nt, Artificial Sequence
  Description of Artificial Sequence: Synthetic oligonucleotide
  Sense strand starting at position 1391 of SEQ ID NO: 1889081
cucccagggugucuaagau

SEQ ID NO: 2578033 - RNA, 19 nt, Artificial Sequence
  Description of Artificial Sequence: Synthetic oligonucleotide
  Antisense strand to SEQ ID NO: 2578032
aucuuagacacccugggag

SEQ ID NO: 2578034 - RNA, 19 nt, Artificial Sequence
  Description of Artificial Sequence: Synthetic oligonucleotide
  Sense strand starting at position 1855 of SEQ ID NO: 1889081
acgacuuaccguuggaaau

SEQ ID NO: 2578035 - RNA, 19 nt, Artificial Sequence
  Description of Artificial Sequence: Synthetic oligonucleotide
  Antisense strand to SEQ ID NO: 2578034
auuuccaacgguaagucgu

SEQ ID NO: 2578036 - RNA, 19 nt, Artificial Sequence
  Description of Artificial Sequence: Synthetic oligonucleotide
  Sense strand starting at position 1856 of SEQ ID NO: 1889081
cgacuuaccguuggaaaug

SEQ ID NO: 2578037 - RNA, 19 nt, Artificial Sequence
  Description of Artificial Sequence: Synthetic oligonucleotide
  Antisense strand to SEQ ID NO: 2578036
cauuuccaacgguaagucg

SEQ ID NO: 2578038 - RNA, 19 nt, Artificial Sequence
  Description of Artificial Sequence: Synthetic oligonucleotide
  Sense strand starting at position 1988 of SEQ ID NO: 1889081
gugcgcauugcuuugacuu

SEQ ID NO: 2578039 - RNA, 19 nt, Artificial Sequence
  Description of Artificial Sequence: Synthetic oligonucleotide
  Antisense strand to SEQ ID NO: 2578038
aagucaaagcaaugcgcac

SEQ ID NO: 2578040 - RNA, 19 nt, Artificial Sequence
  Description of Artificial Sequence: Synthetic oligonucleotide
  Sense strand starting at position 2172 of SEQ ID NO: 1889081
ggaggaaugacgggaguuu

SEQ ID NO: 2578041 - RNA, 19 nt, Artificial Sequence
  Description of Artificial Sequence: Synthetic oligonucleotide
  Antisense strand to SEQ ID NO: 2578040
aaacucccgucauuccucc

SEQ ID NO: 2578042 - RNA, 19 nt, Artificial Sequence
  Description of Artificial Sequence: Synthetic oligonucleotide
  Sense strand starting at position 2283 of SEQ ID NO: 1889081
gggccagcgagugacuaau

SEQ ID NO: 2578043 - RNA, 19 nt, Artificial Sequence
  Description of Artificial Sequence: Synthetic oligonucleotide
  Antisense strand to SEQ ID NO: 2578042
auuagucacucgcuggccc

SEQ ID NO: 2578044 - RNA, 19 nt, Artificial Sequence
  Description of Artificial Sequence: Synthetic oligonucleotide
  Sense strand starting at position 2289 of SEQ ID NO: 1889081
gcgagugacuaauugauug

SEQ ID NO: 2578045 - RNA, 19 nt, Artificial Sequence
  Description of Artificial Sequence: Synthetic oligonucleotide
  Antisense strand to SEQ ID NO: 2578044
caaucaauuagucacucgc

SEQ ID NO: 2578046 - RNA, 19 nt, Artificial Sequence
  Description of Artificial Sequence: Synthetic oligonucleotide
  Sense strand starting at position 2293 of SEQ ID NO: 1889081
gugacuaauugauugaguc

SEQ ID NO: 2578047 - RNA, 19 nt, Artificial Sequence
  Description of Artificial Sequence: Synthetic oligonucleotide
  Antisense strand to SEQ ID NO: 2578046
gacucaaucaauuagucac

SEQ ID NO: 2578048 - RNA, 19 nt, Artificial Sequence
  Description of Artificial Sequence: Synthetic oligonucleotide
  Sense strand starting at position 2294 of SEQ ID NO: 1889081
ugacuaauugauugaguca

SEQ ID NO: 2578049 - RNA, 19 nt, Artificial Sequence
  Description of Artificial Sequence: Synthetic oligonucleotide
  Antisense strand to SEQ ID NO: 2578048
ugacucaaucaauuaguca

SEQ ID NO: 2578050 - RNA, 19 nt, Artificial Sequence
  Description of Artificial Sequence: Synthetic oligonucleotide
  Sense strand starting at position 2307 of SEQ ID NO: 1889081
gagucacucagcgcuugua

SEQ ID NO: 2578051 - RNA, 19 nt, Artificial Sequence
  Description of Artificial Sequence: Synthetic oligonucleotide
  Antisense strand to SEQ ID NO: 2578050
uacaagcgcugagugacuc

SEQ ID NO: 2578052 - RNA, 19 nt, Artificial Sequence
  Description of Artificial Sequence: Synthetic oligonucleotide
  Sense strand starting at position 2308 of SEQ ID NO: 1889081
agucacucagcgcuuguau

SEQ ID NO: 2578053 - RNA, 19 nt, Artificial Sequence
  Description of Artificial Sequence: Synthetic oligonucleotide
  Antisense strand to SEQ ID NO: 2578052
auacaagcgcugagugacu

SEQ ID NO: 2578054 - RNA, 19 nt, Artificial Sequence
  Description of Artificial Sequence: Synthetic oligonucleotide
  Sense strand starting at position 2389 of SEQ ID NO: 1889081
agguguuacgaugauuauu

SEQ ID NO: 2578055 - RNA, 19 nt, Artificial Sequence
  Description of Artificial Sequence: Synthetic oligonucleotide
  Antisense strand to SEQ ID NO: 2578054
aauaaucaucguaacaccu

SEQ ID NO: 2578056 - RNA, 19 nt, Artificial Sequence
  Description of Artificial Sequence: Synthetic oligonucleotide
  Sense strand starting at position 2467 of SEQ ID NO: 1889081
gguagcaaacccgaggaau

SEQ ID NO: 2578057 - RNA, 19 nt, Artificial Sequence
  Description of Artificial Sequence: Synthetic oligonucleotide
  Antisense strand to SEQ ID NO: 2578056
auuccucggguuugcuacc

SEQ ID NO: 2578058 - RNA, 19 nt, Artificial Sequence
  Description of Artificial Sequence: Synthetic oligonucleotide
  Sense strand starting at position 2540 of SEQ ID NO: 1889081
ugucucuuccuccagacua

SEQ ID NO: 2578059 - RNA, 19 nt, Artificial Sequence
  Description of Artificial Sequence: Synthetic oligonucleotide
  Antisense strand to SEQ ID NO: 2578058
uagucuggaggaagagaca

SEQ ID NO: 2578060 - RNA, 19 nt, Artificial Sequence
  Description of Artificial Sequence: Synthetic oligonucleotide
  Sense strand starting at position 2668 of SEQ ID NO: 1889081
ccagucaguugauuccaaa

SEQ ID NO: 2578061 - RNA, 19 nt, Artificial Sequence
  Description of Artificial Sequence: Synthetic oligonucleotide
  Antisense strand to SEQ ID NO: 2578060
uuuggaaucaacugacugg

SEQ ID NO: 2578062 - RNA, 19 nt, Artificial Sequence
  Description of Artificial Sequence: Synthetic oligonucleotide
  Sense strand starting at position 2711 of SEQ ID NO: 1889081
ucgcucacugaggauaauu

SEQ ID NO: 2578063 - RNA, 19 nt, Artificial Sequence
  Description of Artificial Sequence: Synthetic oligonucleotide
  Antisense strand to SEQ ID NO: 2578062
aauuauccucagugagcga

SEQ ID NO: 2578064 - RNA, 19 nt, Artificial Sequence
  Description of Artificial Sequence: Synthetic oligonucleotide
  Sense strand starting at position 2724 of SEQ ID NO: 1889081
auaauugagcugugcauga

SEQ ID NO: 2578065 - RNA, 19 nt, Artificial Sequence
  Description of Artificial Sequence: Synthetic oligonucleotide
  Antisense strand to SEQ ID NO: 2578064
ucaugcacagcucaauuau

SEQ ID NO: 2578066 - RNA, 19 nt, Artificial Sequence
  Description of Artificial Sequence: Synthetic oligonucleotide
  Sense strand starting at position 2726 of SEQ ID NO: 1889081
aauugagcugugcaugaau

SEQ ID NO: 2578067 - RNA, 19 nt, Artificial Sequence
  Description of Artificial Sequence: Synthetic oligonucleotide
  Antisense strand to SEQ ID NO: 2578066
auucaugcacagcucaauu

SEQ ID NO: 2578068 - RNA, 19 nt, Artificial Sequence
  Description of Artificial Sequence: Synthetic oligonucleotide
  Sense strand starting at position 2776 of SEQ ID NO: 1889081
cccucuucuguuggguaaa

SEQ ID NO: 2578069 - RNA, 19 nt, Artificial Sequence
  Description of Artificial Sequence: Synthetic oligonucleotide
  Antisense strand to SEQ ID NO: 2578068
uuuacccaacagaagaggg

SEQ ID NO: 2578070 - RNA, 19 nt, Artificial Sequence
  Description of Artificial Sequence: Synthetic oligonucleotide
  Sense strand starting at position 2838 of SEQ ID NO: 1889081
agguguugcuaauugaauc

SEQ ID NO: 2578071 - RNA, 19 nt, Artificial Sequence
  Description of Artificial Sequence: Synthetic oligonucleotide
  Antisense strand to SEQ ID NO: 2578070
gauucaauuagcaacaccu

SEQ ID NO: 2578072 - RNA, 19 nt, Artificial Sequence
  Description of Artificial Sequence: Synthetic oligonucleotide
  Sense strand starting at position 2850 of SEQ ID NO: 1889081
uugaaucuccuguggucau

SEQ ID NO: 2578073 - RNA, 19 nt, Artificial Sequence
  Description of Artificial Sequence: Synthetic oligonucleotide
  Antisense strand to SEQ ID NO: 2578072
augaccacaggagauucaa

SEQ ID NO: 2578074 - RNA, 19 nt, Artificial Sequence
  Description of Artificial Sequence: Synthetic oligonucleotide
  Sense strand starting at position 2950 of SEQ ID NO: 1889081
cacuuagucgcagaagacu

SEQ ID NO: 2578075 - RNA, 19 nt, Artificial Sequence
  Description of Artificial Sequence: Synthetic oligonucleotide
  Antisense strand to SEQ ID NO: 2578074
agucuucugcgacuaagug

SEQ ID NO: 2578076 - RNA, 19 nt, Artificial Sequence
  Description of Artificial Sequence: Synthetic oligonucleotide
  Sense strand starting at position 2989 of SEQ ID NO: 1889081
aggugaguucccuggguca

SEQ ID NO: 2578077 - RNA, 19 nt, Artificial Sequence
  Description of Artificial Sequence: Synthetic oligonucleotide
  Antisense strand to SEQ ID NO: 2578076
ugacccagggaacucaccu

SEQ ID NO: 2578078 - RNA, 19 nt, Artificial Sequence
  Description of Artificial Sequence: Synthetic oligonucleotide
  Sense strand starting at position 3016 of SEQ ID NO: 1889081
gaucuagugcuauagugau

SEQ ID NO: 2578079 - RNA, 19 nt, Artificial Sequence
  Description of Artificial Sequence: Synthetic oligonucleotide
  Antisense strand to SEQ ID NO: 2578078
aucacuauagcacuagauc

SEQ ID NO: 2578080 - RNA, 19 nt, Artificial Sequence
  Description of Artificial Sequence: Synthetic oligonucleotide
  Sense strand starting at position 3320 of SEQ ID NO: 1889081
gugaaagucacagguggau

SEQ ID NO: 2578081 - RNA, 19 nt, Artificial Sequence
  Description of Artificial Sequence: Synthetic oligonucleotide
  Antisense strand to SEQ ID NO: 2578080
auccaccugugacuuucac

SEQ ID NO: 2578082 - RNA, 19 nt, Artificial Sequence
  Description of Artificial Sequence: Synthetic oligonucleotide
  Sense strand starting at position 3484 of SEQ ID NO: 1889081
gccauuggcuauuucugaa

SEQ ID NO: 2578083 - RNA, 19 nt, Artificial Sequence
  Description of Artificial Sequence: Synthetic oligonucleotide
  Antisense strand to SEQ ID NO: 2578082
uucagaaauagccaauggc

SEQ ID NO: 2578084 - RNA, 19 nt, Artificial Sequence
  Description of Artificial Sequence: Synthetic oligonucleotide
  Sense strand starting at position 3487 of SEQ ID NO: 1889081
auuggcuauuucugaauuu

SEQ ID NO: 2578085 - RNA, 19 nt, Artificial Sequence
  Description of Artificial Sequence: Synthetic oligonucleotide
  Antisense strand to SEQ ID NO: 2578084
aaauucagaaauagccaau

SEQ ID NO: 2578086 - RNA, 19 nt, Artificial Sequence
  Description of Artificial Sequence: Synthetic oligonucleotide
  Sense strand starting at position 3639 of SEQ ID NO: 1889081
ccagcucugcugccuuauu

SEQ ID NO: 2578087 - RNA, 19 nt, Artificial Sequence
  Description of Artificial Sequence: Synthetic oligonucleotide
  Antisense strand to SEQ ID NO: 2578086
aauaaggcagcagagcugg

SEQ ID NO: 2578088 - RNA, 19 nt, Artificial Sequence
  Description of Artificial Sequence: Synthetic oligonucleotide
  Sense strand starting at position 3716 of SEQ ID NO: 1889081
cccuguuguccugauggua

SEQ ID NO: 2578089 - RNA, 19 nt, Artificial Sequence
  Description of Artificial Sequence: Synthetic oligonucleotide
  Antisense strand to SEQ ID NO: 2578088
uaccaucaggacaacaggg

SEQ ID NO: 2578090 - RNA, 19 nt, Artificial Sequence
  Description of Artificial Sequence: Synthetic oligonucleotide
  Sense strand starting at position 3749 of SEQ ID NO: 1889081
gcaguaugaaaugguuacu

SEQ ID NO: 2578091 - RNA, 19 nt, Artificial Sequence
  Description of Artificial Sequence: Synthetic oligonucleotide
  Antisense strand to SEQ ID NO: 2578090
aguaaccauuucauacugc

SEQ ID NO: 2578092 - RNA, 19 nt, Artificial Sequence
  Description of Artificial Sequence: Synthetic oligonucleotide
  Sense strand starting at position 3752 of SEQ ID NO: 1889081
guaugaaaugguuacucug

SEQ ID NO: 2578093 - RNA, 19 nt, Artificial Sequence
  Description of Artificial Sequence: Synthetic oligonucleotide
  Antisense strand to SEQ ID NO: 2578092
cagaguaaccauuucauac

SEQ ID NO: 2578094 - RNA, 19 nt, Artificial Sequence
  Description of Artificial Sequence: Synthetic oligonucleotide
  Sense strand starting at position 3758 of SEQ ID NO: 1889081
aaugguuacucugcacaga

SEQ ID NO: 2578095 - RNA, 19 nt, Artificial Sequence
  Description of Artificial Sequence: Synthetic oligonucleotide
  Antisense strand to SEQ ID NO: 2578094
ucugugcagaguaaccauu

SEQ ID NO: 2578096 - RNA, 19 nt, Artificial Sequence
  Description of Artificial Sequence: Synthetic oligonucleotide
  Sense strand starting at position 3759 of SEQ ID NO: 1889081
augguuacucugcacagaa

SEQ ID NO: 2578097 - RNA, 19 nt, Artificial Sequence
  Description of Artificial Sequence: Synthetic oligonucleotide
  Antisense strand to SEQ ID NO: 2578096
uucugugcagaguaaccau

SEQ ID NO: 2578098 - RNA, 19 nt, Artificial Sequence
  Description of Artificial Sequence: Synthetic oligonucleotide
  Sense strand starting at position 3761 of SEQ ID NO: 1889081
gguuacucugcacagaauc

SEQ ID NO: 2578099 - RNA, 19 nt, Artificial Sequence
  Description of Artificial Sequence: Synthetic oligonucleotide
  Antisense strand to SEQ ID NO: 2578098
gauucugugcagaguaacc

SEQ ID NO: 2578100 - RNA, 19 nt, Artificial Sequence
  Description of Artificial Sequence: Synthetic oligonucleotide
  Sense strand starting at position 3772 of SEQ ID NO: 1889081
acagaaucuccuugcugga

SEQ ID NO: 2578101 - RNA, 19 nt, Artificial Sequence
  Description of Artificial Sequence: Synthetic oligonucleotide
  Antisense strand to SEQ ID NO: 2578100
uccagcaaggagauucugu

SEQ ID NO: 2578102 - RNA, 19 nt, Artificial Sequence
  Description of Artificial Sequence: Synthetic oligonucleotide
  Sense strand starting at position 3888 of SEQ ID NO: 1889081
gccaguuagagagguggau

SEQ ID NO: 2578103 - RNA, 19 nt, Artificial Sequence
  Description of Artificial Sequence: Synthetic oligonucleotide
  Antisense strand to SEQ ID NO: 2578102
auccaccucucuaacuggc

SEQ ID NO: 2578104 - RNA, 19 nt, Artificial Sequence
  Description of Artificial Sequence: Synthetic oligonucleotide
  Sense strand starting at position 22 of SEQ ID NO: 1889082
acaacacacuagucuguua

SEQ ID NO: 2578105 - RNA, 19 nt, Artificial Sequence
  Description of Artificial Sequence: Synthetic oligonucleotide
  Antisense strand to SEQ ID NO: 2578104
uaacagacuaguguguugu

SEQ ID NO: 2578106 - RNA, 19 nt, Artificial Sequence
  Description of Artificial Sequence: Synthetic oligonucleotide
  Sense strand starting at position 137 of SEQ ID NO: 1889082
cucaguauccauuggcuca

SEQ ID NO: 2578107 - RNA, 19 nt, Artificial Sequence
  Description of Artificial Sequence: Synthetic oligonucleotide
  Antisense strand to SEQ ID NO: 2578106
ugagccaauggauacugag

SEQ ID NO: 2578108 - RNA, 19 nt, Artificial Sequence
  Description of Artificial Sequence: Synthetic oligonucleotide
  Sense strand starting at position 213 of SEQ ID NO: 1889082
guccaugguguaugaucua

SEQ ID NO: 2578109 - RNA, 19 nt, Artificial Sequence
  Description of Artificial Sequence: Synthetic oligonucleotide
  Antisense strand to SEQ ID NO: 2578108
uagaucauacaccauggac

SEQ ID NO: 2578110 - RNA, 19 nt, Artificial Sequence
  Description of Artificial Sequence: Synthetic oligonucleotide
  Sense strand starting at position 216 of SEQ ID NO: 1889082
caugguguaugaucuagga

SEQ ID NO: 2578111 - RNA, 19 nt, Artificial Sequence
  Description of Artificial Sequence: Synthetic oligonucleotide
  Antisense strand to SEQ ID NO: 2578110
uccuagaucauacaccaug

SEQ ID NO: 2578112 - RNA, 19 nt, Artificial Sequence
  Description of Artificial Sequence: Synthetic oligonucleotide
  Sense strand starting at position 218 of SEQ ID NO: 1889082
ugguguaugaucuaggaac

SEQ ID NO: 2578113 - RNA, 19 nt, Artificial Sequence
  Description of Artificial Sequence: Synthetic oligonucleotide
  Antisense strand to SEQ ID NO: 2578112
guuccuagaucauacacca

SEQ ID NO: 2578114 - RNA, 19 nt, Artificial Sequence
  Description of Artificial Sequence: Synthetic oligonucleotide
  Sense strand starting at position 220 of SEQ ID NO: 1889082
guguaugaucuaggaacca

SEQ ID NO: 2578115 - RNA, 19 nt, Artificial Sequence
  Description of Artificial Sequence: Synthetic oligonucleotide
  Antisense strand to SEQ ID NO: 2578114
ugguuccuagaucauacac

SEQ ID NO: 2578116 - RNA, 19 nt, Artificial Sequence
  Description of Artificial Sequence: Synthetic oligonucleotide
  Sense strand starting at position 291 of SEQ ID NO: 1889082
acaggaaucugcguguaaa

SEQ ID NO: 2578117 - RNA, 19 nt, Artificial Sequence
  Description of Artificial Sequence: Synthetic oligonucleotide
  Antisense strand to SEQ ID NO: 2578116
uuuacacgcagauuccugu

SEQ ID NO: 2578118 - RNA, 19 nt, Artificial Sequence
  Description of Artificial Sequence: Synthetic oligonucleotide
  Sense strand starting at position 292 of SEQ ID NO: 1889082
caggaaucugcguguaaau

SEQ ID NO: 2578119 - RNA, 19 nt, Artificial Sequence
  Description of Artificial Sequence: Synthetic oligonucleotide
  Antisense strand to SEQ ID NO: 2578118
auuuacacgcagauuccug

SEQ ID NO: 2578120 - RNA, 19 nt, Artificial Sequence
  Description of Artificial Sequence: Synthetic oligonucleotide
  Sense strand starting at position 294 of SEQ ID NO: 1889082
ggaaucugcguguaaaucu

SEQ ID NO: 2578121 - RNA, 19 nt, Artificial Sequence
  Description of Artificial Sequence: Synthetic oligonucleotide
  Antisense strand to SEQ ID NO: 2578120
agauuuacacgcagauucc

SEQ ID NO: 2578122 - RNA, 19 nt, Artificial Sequence
  Description of Artificial Sequence: Synthetic oligonucleotide
  Sense strand starting at position 387 of SEQ ID NO: 1889082
ugccaugacccagagugaa

SEQ ID NO: 2578123 - RNA, 19 nt, Artificial Sequence
  Description of Artificial Sequence: Synthetic oligonucleotide
  Antisense strand to SEQ ID NO: 2578122
uucacucugggucauggca

SEQ ID NO: 2578124 - RNA, 19 nt, Artificial Sequence
  Description of Artificial Sequence: Synthetic oligonucleotide
  Sense strand starting at position 409 of SEQ ID NO: 1889082
guguaugugcuugugugga

SEQ ID NO: 2578125 - RNA, 19 nt, Artificial Sequence
  Description of Artificial Sequence: Synthetic oligonucleotide
  Antisense strand to SEQ ID NO: 2578124
uccacacaagcacauacac

SEQ ID NO: 2578126 - RNA, 19 nt, Artificial Sequence
  Description of Artificial Sequence: Synthetic oligonucleotide
  Sense strand starting at position 688 of SEQ ID NO: 1889082
gcgauuauuacggacauac

SEQ ID NO: 2578127 - RNA, 19 nt, Artificial Sequence
  Description of Artificial Sequence: Synthetic oligonucleotide
  Antisense strand to SEQ ID NO: 2578126
guauguccguaauaaucgc

SEQ ID NO: 2578128 - RNA, 19 nt, Artificial Sequence
  Description of Artificial Sequence: Synthetic oligonucleotide
  Sense strand starting at position 959 of SEQ ID NO: 1889082
ggaugaagguuccagagaa

SEQ ID NO: 2578129 - RNA, 19 nt, Artificial Sequence
  Description of Artificial Sequence: Synthetic oligonucleotide
  Antisense strand to SEQ ID NO: 2578128
uucucuggaaccuucaucc

SEQ ID NO: 2578130 - RNA, 19 nt, Artificial Sequence
  Description of Artificial Sequence: Synthetic oligonucleotide
  Sense strand starting at position 1002 of SEQ ID NO: 1889082
aaaucacuggcccguguaa

SEQ ID NO: 2578131 - RNA, 19 nt, Artificial Sequence
  Description of Artificial Sequence: Synthetic oligonucleotide
  Antisense strand to SEQ ID NO: 2578130
uuacacgggccagugauuu

SEQ ID NO: 2578132 - RNA, 19 nt, Artificial Sequence
  Description of Artificial Sequence: Synthetic oligonucleotide
  Sense strand starting at position 1056 of SEQ ID NO: 1889082
gaauuaagacagcgagaug

SEQ ID NO: 2578133 - RNA, 19 nt, Artificial Sequence
  Description of Artificial Sequence: Synthetic oligonucleotide
  Antisense strand to SEQ ID NO: 2578132
caucucgcugucuuaauuc

SEQ ID NO: 2578134 - RNA, 19 nt, Artificial Sequence
  Description of Artificial Sequence: Synthetic oligonucleotide
  Sense strand starting at position 1068 of SEQ ID NO: 1889082
cgagaugucucaguccucu

SEQ ID NO: 2578135 - RNA, 19 nt, Artificial Sequence
  Description of Artificial Sequence: Synthetic oligonucleotide
  Antisense strand to SEQ ID NO: 2578134
agaggacugagacaucucg

SEQ ID NO: 2578136 - RNA, 19 nt, Artificial Sequence
  Description of Artificial Sequence: Synthetic oligonucleotide
  Sense strand starting at position 1375 of SEQ ID NO: 1889082
gcgaaacucccauggcgaa

SEQ ID NO: 2578137 - RNA, 19 nt, Artificial Sequence
  Description of Artificial Sequence: Synthetic oligonucleotide
  Antisense strand to SEQ ID NO: 2578136
uucgccaugggaguuucgc

SEQ ID NO: 2578138 - RNA, 19 nt, Artificial Sequence
  Description of Artificial Sequence: Synthetic oligonucleotide
  Sense strand starting at position 1699 of SEQ ID NO: 1889082
cggcgugcuccgguuucaa

SEQ ID NO: 2578139 - RNA, 19 nt, Artificial Sequence
  Description of Artificial Sequence: Synthetic oligonucleotide
  Antisense strand to SEQ ID NO: 2578138
uugaaaccggagcacgccg

SEQ ID NO: 2578140 - RNA, 19 nt, Artificial Sequence
  Description of Artificial Sequence: Synthetic oligonucleotide
  Sense strand starting at position 1701 of SEQ ID NO: 1889082
gcgugcuccgguuucaagu

SEQ ID NO: 2578141 - RNA, 19 nt, Artificial Sequence
  Description of Artificial Sequence: Synthetic oligonucleotide
  Antisense strand to SEQ ID NO: 2578140
acuugaaaccggagcacgc

SEQ ID NO: 2578142 - RNA, 19 nt, Artificial Sequence
  Description of Artificial Sequence: Synthetic oligonucleotide
  Sense strand starting at position 1938 of SEQ ID NO: 1889082
agaccaauuugucagcuua

SEQ ID NO: 2578143 - RNA, 19 nt, Artificial Sequence
  Description of Artificial Sequence: Synthetic oligonucleotide
  Antisense strand to SEQ ID NO: 2578142
uaagcugacaaauuggucu

SEQ ID NO: 2578144 - RNA, 19 nt, Artificial Sequence
  Description of Artificial Sequence: Synthetic oligonucleotide
  Sense strand starting at position 1983 of SEQ ID NO: 1889082
gaacgacaccauuguauca

SEQ ID NO: 2578145 - RNA, 19 nt, Artificial Sequence
  Description of Artificial Sequence: Synthetic oligonucleotide
  Antisense strand to SEQ ID NO: 2578144
ugauacaauggugucguuc

SEQ ID NO: 2578146 - RNA, 19 nt, Artificial Sequence
  Description of Artificial Sequence: Synthetic oligonucleotide
  Sense strand starting at position 2189 of SEQ ID NO: 1889082
agcuuaggucuugaagaug

SEQ ID NO: 2578147 - RNA, 19 nt, Artificial Sequence
  Description of Artificial Sequence: Synthetic oligonucleotide
  Antisense strand to SEQ ID NO: 2578146
caucuucaagaccuaagcu

SEQ ID NO: 2578148 - RNA, 19 nt, Artificial Sequence
  Description of Artificial Sequence: Synthetic oligonucleotide
  Sense strand starting at position 2269 of SEQ ID NO: 1889082
ucuccaggaugguuuauua

SEQ ID NO: 2578149 - RNA, 19 nt, Artificial Sequence
  Description of Artificial Sequence: Synthetic oligonucleotide
  Antisense strand to SEQ ID NO: 2578148
uaauaaaccauccuggaga

SEQ ID NO: 2578150 - RNA, 19 nt, Artificial Sequence
  Description of Artificial Sequence: Synthetic oligonucleotide
  Sense strand starting at position 2390 of SEQ ID NO: 1889082
cacagccagguuuaagaau

SEQ ID NO: 2578151 - RNA, 19 nt, Artificial Sequence
  Description of Artificial Sequence: Synthetic oligonucleotide
  Antisense strand to SEQ ID NO: 2578150
auucuuaaaccuggcugug

SEQ ID NO: 2578152 - RNA, 19 nt, Artificial Sequence
  Description of Artificial Sequence: Synthetic oligonucleotide
  Sense strand starting at position 2830 of SEQ ID NO: 1889082
ccaugcuaacugggugauu

SEQ ID NO: 2578153 - RNA, 19 nt, Artificial Sequence
  Description of Artificial Sequence: Synthetic oligonucleotide
  Antisense strand to SEQ ID NO: 2578152
aaucacccaguuagcaugg

SEQ ID NO: 2578154 - RNA, 19 nt, Artificial Sequence
  Description of Artificial Sequence: Synthetic oligonucleotide
  Sense strand starting at position 3145 of SEQ ID NO: 1889082
guggauucccuacgagaag

SEQ ID NO: 2578155 - RNA, 19 nt, Artificial Sequence
  Description of Artificial Sequence: Synthetic oligonucleotide
  Antisense strand to SEQ ID NO: 2578154
cuucucguagggaauccac

SEQ ID NO: 2578156 - RNA, 19 nt, Artificial Sequence
  Description of Artificial Sequence: Synthetic oligonucleotide
  Sense strand starting at position 3172 of SEQ ID NO: 1889082
agaaaucacuggucccaca

SEQ ID NO: 2578157 - RNA, 19 nt, Artificial Sequence
  Description of Artificial Sequence: Synthetic oligonucleotide
  Antisense strand to SEQ ID NO: 2578156
ugugggaccagugauuucu

SEQ ID NO: 2578158 - RNA, 19 nt, Artificial Sequence
  Description of Artificial Sequence: Synthetic oligonucleotide
  Sense strand starting at position 3189 of SEQ ID NO: 1889082
cagugaaaugaacguuucu

SEQ ID NO: 2578159 - RNA, 19 nt, Artificial Sequence
  Description of Artificial Sequence: Synthetic oligonucleotide
  Antisense strand to SEQ ID NO: 2578158
agaaacguucauuucacug

SEQ ID NO: 2578160 - RNA, 19 nt, Artificial Sequence
  Description of Artificial Sequence: Synthetic oligonucleotide
  Sense strand starting at position 3196 of SEQ ID NO: 1889082
augaacguuucucugggaa

SEQ ID NO: 2578161 - RNA, 19 nt, Artificial Sequence
  Description of Artificial Sequence: Synthetic oligonucleotide
  Antisense strand to SEQ ID NO: 2578160
uucccagagaaacguucau

SEQ ID NO: 2578162 - RNA, 19 nt, Artificial Sequence
  Description of Artificial Sequence: Synthetic oligonucleotide
  Sense strand starting at position 3238 of SEQ ID NO: 1889082
gggucaauucccugguaga

SEQ ID NO: 2578163 - RNA, 19 nt, Artificial Sequence
  Description of Artificial Sequence: Synthetic oligonucleotide
  Antisense strand to SEQ ID NO: 2578162
ucuaccagggaauugaccc

SEQ ID NO: 2578164 - RNA, 19 nt, Artificial Sequence
  Description of Artificial Sequence: Synthetic oligonucleotide
  Sense strand starting at position 3239 of SEQ ID NO: 1889082
ggucaauucccugguagac

SEQ ID NO: 2578165 - RNA, 19 nt, Artificial Sequence
  Description of Artificial Sequence: Synthetic oligonucleotide
  Antisense strand to SEQ ID NO: 2578164
gucuaccagggaauugacc

SEQ ID NO: 2578166 - RNA, 19 nt, Artificial Sequence
  Description of Artificial Sequence: Synthetic oligonucleotide
  Sense strand starting at position 3379 of SEQ ID NO: 1889082
gugccuagacucugggaaa

SEQ ID NO: 2578167 - RNA, 19 nt, Artificial Sequence
  Description of Artificial Sequence: Synthetic oligonucleotide
  Antisense strand to SEQ ID NO: 2578166
uuucccagagucuaggcac

SEQ ID NO: 2578168 - RNA, 19 nt, Artificial Sequence
  Description of Artificial Sequence: Synthetic oligonucleotide
  Sense strand starting at position 3382 of SEQ ID NO: 1889082
ccuagacucugggaaauag

SEQ ID NO: 2578169 - RNA, 19 nt, Artificial Sequence
  Description of Artificial Sequence: Synthetic oligonucleotide
  Antisense strand to SEQ ID NO: 2578168
cuauuucccagagucuagg

SEQ ID NO: 2578170 - RNA, 19 nt, Artificial Sequence
  Description of Artificial Sequence: Synthetic oligonucleotide
  Sense strand starting at position 3468 of SEQ ID NO: 1889082
gcugcuauucgcuucgcau

SEQ ID NO: 2578171 - RNA, 19 nt, Artificial Sequence
  Description of Artificial Sequence: Synthetic oligonucleotide
  Antisense strand to SEQ ID NO: 2578170
augcgaagcgaauagcagc

SEQ ID NO: 2578172 - RNA, 19 nt, Artificial Sequence
  Description of Artificial Sequence: Synthetic oligonucleotide
  Sense strand starting at position 3525 of SEQ ID NO: 1889082
cuaugauuaucuucuguua

SEQ ID NO: 2578173 - RNA, 19 nt, Artificial Sequence
  Description of Artificial Sequence: Synthetic oligonucleotide
  Antisense strand to SEQ ID NO: 2578172
uaacagaagauaaucauag

SEQ ID NO: 2578174 - RNA, 19 nt, Artificial Sequence
  Description of Artificial Sequence: Synthetic oligonucleotide
  Sense strand starting at position 3573 of SEQ ID NO: 1889082
cagcuagcagguuauuaua

SEQ ID NO: 2578175 - RNA, 19 nt, Artificial Sequence
  Description of Artificial Sequence: Synthetic oligonucleotide
  Antisense strand to SEQ ID NO: 2578174
uauaauaaccugcuagcug

SEQ ID NO: 2578176 - RNA, 19 nt, Artificial Sequence
  Description of Artificial Sequence: Synthetic oligonucleotide
  Sense strand starting at position 3643 of SEQ ID NO: 1889082
aggacagagugcugauuua

SEQ ID NO: 2578177 - RNA, 19 nt, Artificial Sequence
  Description of Artificial Sequence: Synthetic oligonucleotide
  Antisense strand to SEQ ID NO: 2578176
uaaaucagcacucuguccu

SEQ ID NO: 2578178 - RNA, 19 nt, Artificial Sequence
  Description of Artificial Sequence: Synthetic oligonucleotide
  Sense strand starting at position 3801 of SEQ ID NO: 1889082
ccuguagaaacauguaugu

SEQ ID NO: 2578179 - RNA, 19 nt, Artificial Sequence
  Description of Artificial Sequence: Synthetic oligonucleotide
  Antisense strand to SEQ ID NO: 2578178
acauacauguuucuacagg

SEQ ID NO: 2578180 - RNA, 19 nt, Artificial Sequence
  Description of Artificial Sequence: Synthetic oligonucleotide
  Sense strand starting at position 3803 of SEQ ID NO: 1889082
uguagaaacauguauguga

SEQ ID NO: 2578181 - RNA, 19 nt, Artificial Sequence
  Description of Artificial Sequence: Synthetic oligonucleotide
  Antisense strand to SEQ ID NO: 2578180
ucacauacauguuucuaca

SEQ ID NO: 2578182 - RNA, 19 nt, Artificial Sequence
  Description of Artificial Sequence: Synthetic oligonucleotide
  Sense strand starting at position 3805 of SEQ ID NO: 1889082
uagaaacauguaugugacu

SEQ ID NO: 2578183 - RNA, 19 nt, Artificial Sequence
  Description of Artificial Sequence: Synthetic oligonucleotide
  Antisense strand to SEQ ID NO: 2578182
agucacauacauguuucua

SEQ ID NO: 2578184 - RNA, 19 nt, Artificial Sequence
  Description of Artificial Sequence: Synthetic oligonucleotide
  Sense strand starting at position 426 of SEQ ID NO: 1889085
gagaguauuaacuggucag

SEQ ID NO: 2578185 - RNA, 19 nt, Artificial Sequence
  Description of Artificial Sequence: Synthetic oligonucleotide
  Antisense strand to SEQ ID NO: 2578184
cugaccaguuaauacucuc

SEQ ID NO: 2578186 - RNA, 19 nt, Artificial Sequence
  Description of Artificial Sequence: Synthetic oligonucleotide
  Sense strand starting at position 427 of SEQ ID NO: 1889085
agaguauuaacuggucagu

SEQ ID NO: 2578187 - RNA, 19 nt, Artificial Sequence
  Description of Artificial Sequence: Synthetic oligonucleotide
  Antisense strand to SEQ ID NO: 2578186
acugaccaguuaauacucu

SEQ ID NO: 2578188 - RNA, 19 nt, Artificial Sequence
  Description of Artificial Sequence: Synthetic oligonucleotide
  Sense strand starting at position 498 of SEQ ID NO: 1889085
aggcgcaauccacagaaua

SEQ ID NO: 2578189 - RNA, 19 nt, Artificial Sequence
  Description of Artificial Sequence: Synthetic oligonucleotide
  Antisense strand to SEQ ID NO: 2578188
uauucuguggauugcgccu

SEQ ID NO: 2578190 - RNA, 19 nt, Artificial Sequence
  Description of Artificial Sequence: Synthetic oligonucleotide
  Sense strand starting at position 508 of SEQ ID NO: 1889085
cacagaauaugacugguua

SEQ ID NO: 2578191 - RNA, 19 nt, Artificial Sequence
  Description of Artificial Sequence: Synthetic oligonucleotide
  Antisense strand to SEQ ID NO: 2578190
uaaccagucauauucugug

SEQ ID NO: 2578192 - RNA, 19 nt, Artificial Sequence
  Description of Artificial Sequence: Synthetic oligonucleotide
  Sense strand starting at position 512 of SEQ ID NO: 1889085
gaauaugacugguuagcua

SEQ ID NO: 2578193 - RNA, 19 nt, Artificial Sequence
  Description of Artificial Sequence: Synthetic oligonucleotide
  Antisense strand to SEQ ID NO: 2578192
uagcuaaccagucauauuc

SEQ ID NO: 2578194 - RNA, 19 nt, Artificial Sequence
  Description of Artificial Sequence: Synthetic oligonucleotide
  Sense strand starting at position 524 of SEQ ID NO: 1889085
uuagcuaaggcacgauuua

SEQ ID NO: 2578195 - RNA, 19 nt, Artificial Sequence
  Description of Artificial Sequence: Synthetic oligonucleotide
  Antisense strand to SEQ ID NO: 2578194
uaaaucgugccuuagcuaa

SEQ ID NO: 2578196 - RNA, 19 nt, Artificial Sequence
  Description of Artificial Sequence: Synthetic oligonucleotide
  Sense strand starting at position 549 of SEQ ID NO: 1889085
ggacaauaaugucccuagu

SEQ ID NO: 2578197 - RNA, 19 nt, Artificial Sequence
  Description of Artificial Sequence: Synthetic oligonucleotide
  Antisense strand to SEQ ID NO: 2578196
acuagggacauuauugucc

SEQ ID NO: 2578198 - RNA, 19 nt, Artificial Sequence
  Description of Artificial Sequence: Synthetic oligonucleotide
  Sense strand starting at position 627 of SEQ ID NO: 1889085
gcuggagggcccuaaauaa

SEQ ID NO: 2578199 - RNA, 19 nt, Artificial Sequence
  Description of Artificial Sequence: Synthetic oligonucleotide
  Antisense strand to SEQ ID NO: 2578198
uuauuuagggcccuccagc

SEQ ID NO: 2578200 - RNA, 19 nt, Artificial Sequence
  Description of Artificial Sequence: Synthetic oligonucleotide
  Sense strand starting at position 642 of SEQ ID NO: 1889085
auaacuuauccguaaggac

SEQ ID NO: 2578201 - RNA, 19 nt, Artificial Sequence
  Description of Artificial Sequence: Synthetic oligonucleotide
  Antisense strand to SEQ ID NO: 2578200
guccuuacggauaaguuau

SEQ ID NO: 2578202 - RNA, 19 nt, Artificial Sequence
  Description of Artificial Sequence: Synthetic oligonucleotide
  Sense strand starting at position 952 of SEQ ID NO: 1889085
ggucauuaguucccagaag

SEQ ID NO: 2578203 - RNA, 19 nt, Artificial Sequence
  Description of Artificial Sequence: Synthetic oligonucleotide
  Antisense strand to SEQ ID NO: 2578202
cuucugggaacuaaugacc

SEQ ID NO: 2578204 - RNA, 19 nt, Artificial Sequence
  Description of Artificial Sequence: Synthetic oligonucleotide
  Sense strand starting at position 1060 of SEQ ID NO: 1889085
guuagaaacuaggcuuuga

SEQ ID NO: 2578205 - RNA, 19 nt, Artificial Sequence
  Description of Artificial Sequence: Synthetic oligonucleotide
  Antisense strand to SEQ ID NO: 2578204
ucaaagccuaguuucuaac

SEQ ID NO: 2578206 - RNA, 19 nt, Artificial Sequence
  Description of Artificial Sequence: Synthetic oligonucleotide
  Sense strand starting at position 1071 of SEQ ID NO: 1889085
ggcuuugacgcucuaguuu

SEQ ID NO: 2578207 - RNA, 19 nt, Artificial Sequence
  Description of Artificial Sequence: Synthetic oligonucleotide
  Antisense strand to SEQ ID NO: 2578206
aaacuagagcgucaaagcc

SEQ ID NO: 2578208 - RNA, 19 nt, Artificial Sequence
  Description of Artificial Sequence: Synthetic oligonucleotide
  Sense strand starting at position 1092 of SEQ ID NO: 1889085
ccacguagugaacaaaucu

SEQ ID NO: 2578209 - RNA, 19 nt, Artificial Sequence
  Description of Artificial Sequence: Synthetic oligonucleotide
  Antisense strand to SEQ ID NO: 2578208
agauuuguucacuacgugg

SEQ ID NO: 2578210 - RNA, 19 nt, Artificial Sequence
  Description of Artificial Sequence: Synthetic oligonucleotide
  Sense strand starting at position 1314 of SEQ ID NO: 1889085
agaaguucgcccuagaaau

SEQ ID NO: 2578211 - RNA, 19 nt, Artificial Sequence
  Description of Artificial Sequence: Synthetic oligonucleotide
  Antisense strand to SEQ ID NO: 2578210
auuucuagggcgaacuucu

SEQ ID NO: 2578212 - RNA, 19 nt, Artificial Sequence
  Description of Artificial Sequence: Synthetic oligonucleotide
  Sense strand starting at position 1316 of SEQ ID NO: 1889085
aaguucgcccuagaaauca

SEQ ID NO: 2578213 - RNA, 19 nt, Artificial Sequence
  Description of Artificial Sequence: Synthetic oligonucleotide
  Antisense strand to SEQ ID NO: 2578212
ugauuucuagggcgaacuu

SEQ ID NO: 2578214 - RNA, 19 nt, Artificial Sequence
  Description of Artificial Sequence: Synthetic oligonucleotide
  Sense strand starting at position 1344 of SEQ ID NO: 1889085
gaagcuuaggaguggcaaa

SEQ ID NO: 2578215 - RNA, 19 nt, Artificial Sequence
  Description of Artificial Sequence: Synthetic oligonucleotide
  Antisense strand to SEQ ID NO: 2578214
uuugccacuccuaagcuuc

SEQ ID NO: 2578216 - RNA, 19 nt, Artificial Sequence
  Description of Artificial Sequence: Synthetic oligonucleotide
  Sense strand starting at position 1944 of SEQ ID NO: 1889085
gucagaauugccuacaaau

SEQ ID NO: 2578217 - RNA, 19 nt, Artificial Sequence
  Description of Artificial Sequence: Synthetic oligonucleotide
  Antisense strand to SEQ ID NO: 2578216
auuuguaggcaauucugac

SEQ ID NO: 2578218 - RNA, 19 nt, Artificial Sequence
  Description of Artificial Sequence: Synthetic oligonucleotide
  Sense strand starting at position 2142 of SEQ ID NO: 1889085
ugucaugauagcuagagcu

SEQ ID NO: 2578219 - RNA, 19 nt, Artificial Sequence
  Description of Artificial Sequence: Synthetic oligonucleotide
  Antisense strand to SEQ ID NO: 2578218
agcucuagcuaucaugaca

SEQ ID NO: 2578220 - RNA, 19 nt, Artificial Sequence
  Description of Artificial Sequence: Synthetic oligonucleotide
  Sense strand starting at position 2144 of SEQ ID NO: 1889085
ucaugauagcuagagcucu

SEQ ID NO: 2578221 - RNA, 19 nt, Artificial Sequence
  Description of Artificial Sequence: Synthetic oligonucleotide
  Antisense strand to SEQ ID NO: 2578220
agagcucuagcuaucauga

SEQ ID NO: 2578222 - RNA, 19 nt, Artificial Sequence
  Description of Artificial Sequence: Synthetic oligonucleotide
  Sense strand starting at position 2150 of SEQ ID NO: 1889085
uagcuagagcucugaagaa

SEQ ID NO: 2578223 - RNA, 19 nt, Artificial Sequence
  Description of Artificial Sequence: Synthetic oligonucleotide
  Antisense strand to SEQ ID NO: 2578222
uucuucagagcucuagcua

SEQ ID NO: 2578224 - RNA, 19 nt, Artificial Sequence
  Description of Artificial Sequence: Synthetic oligonucleotide
  Sense strand starting at position 2171 of SEQ ID NO: 1889085
gaaauugguguuggaggaa

SEQ ID NO: 2578225 - RNA, 19 nt, Artificial Sequence
  Description of Artificial Sequence: Synthetic oligonucleotide
  Antisense strand to SEQ ID NO: 2578224
uuccuccaacaccaauuuc

SEQ ID NO: 2578226 - RNA, 19 nt, Artificial Sequence
  Description of Artificial Sequence: Synthetic oligonucleotide
  Sense strand starting at position 2602 of SEQ ID NO: 1889085
guaguaugccaagauggca

SEQ ID NO: 2578227 - RNA, 19 nt, Artificial Sequence
  Description of Artificial Sequence: Synthetic oligonucleotide
  Antisense strand to SEQ ID NO: 2578226
ugccaucuuggcauacuac

SEQ ID NO: 2578228 - RNA, 19 nt, Artificial Sequence
  Description of Artificial Sequence: Synthetic oligonucleotide
  Sense strand starting at position 2735 of SEQ ID NO: 1889085
ucugaaucucuuggugauc

SEQ ID NO: 2578229 - RNA, 19 nt, Artificial Sequence
  Description of Artificial Sequence: Synthetic oligonucleotide
  Antisense strand to SEQ ID NO: 2578228
gaucaccaagagauucaga

SEQ ID NO: 2578230 - RNA, 19 nt, Artificial Sequence
  Description of Artificial Sequence: Synthetic oligonucleotide
  Sense strand starting at position 2738 of SEQ ID NO: 1889085
gaaucucuuggugaucuca

SEQ ID NO: 2578231 - RNA, 19 nt, Artificial Sequence
  Description of Artificial Sequence: Synthetic oligonucleotide
  Antisense strand to SEQ ID NO: 2578230
ugagaucaccaagagauuc

SEQ ID NO: 2578232 - RNA, 19 nt, Artificial Sequence
  Description of Artificial Sequence: Synthetic oligonucleotide
  Sense strand starting at position 2740 of SEQ ID NO: 1889085
aucucuuggugaucucaca

SEQ ID NO: 2578233 - RNA, 19 nt, Artificial Sequence
  Description of Artificial Sequence: Synthetic oligonucleotide
  Antisense strand to SEQ ID NO: 2578232
ugugagaucaccaagagau

SEQ ID NO: 2578234 - RNA, 19 nt, Artificial Sequence
  Description of Artificial Sequence: Synthetic oligonucleotide
  Sense strand starting at position 2784 of SEQ ID NO: 1889085
ggagcccugaucugaaacu

SEQ ID NO: 2578235 - RNA, 19 nt, Artificial Sequence
  Description of Artificial Sequence: Synthetic oligonucleotide
  Antisense strand to SEQ ID NO: 2578234
aguuucagaucagggcucc

SEQ ID NO: 2578236 - RNA, 19 nt, Artificial Sequence
  Description of Artificial Sequence: Synthetic oligonucleotide
  Sense strand starting at position 2938 of SEQ ID NO: 1889085
gucgauguacauuaaucau

SEQ ID NO: 2578237 - RNA, 19 nt, Artificial Sequence
  Description of Artificial Sequence: Synthetic oligonucleotide
  Antisense strand to SEQ ID NO: 2578236
augauuaauguacaucgac

SEQ ID NO: 2578238 - RNA, 19 nt, Artificial Sequence
  Description of Artificial Sequence: Synthetic oligonucleotide
  Sense strand starting at position 2970 of SEQ ID NO: 1889085
cuuugagaucacuaguuau

SEQ ID NO: 2578239 - RNA, 19 nt, Artificial Sequence
  Description of Artificial Sequence: Synthetic oligonucleotide
  Antisense strand to SEQ ID NO: 2578238
auaacuagugaucucaaag

SEQ ID NO: 2578240 - RNA, 19 nt, Artificial Sequence
  Description of Artificial Sequence: Synthetic oligonucleotide
  Sense strand starting at position 2973 of SEQ ID NO: 1889085
ugagaucacuaguuauguu

SEQ ID NO: 2578241 - RNA, 19 nt, Artificial Sequence
  Description of Artificial Sequence: Synthetic oligonucleotide
  Antisense strand to SEQ ID NO: 2578240
aacauaacuagugaucuca

SEQ ID NO: 2578242 - RNA, 19 nt, Artificial Sequence
  Description of Artificial Sequence: Synthetic oligonucleotide
  Sense strand starting at position 3000 of SEQ ID NO: 1889085
gguuaaagaucuucggaca

SEQ ID NO: 2578243 - RNA, 19 nt, Artificial Sequence
  Description of Artificial Sequence: Synthetic oligonucleotide
  Antisense strand to SEQ ID NO: 2578242
uguccgaagaucuuuaacc

SEQ ID NO: 2578244 - RNA, 19 nt, Artificial Sequence
  Description of Artificial Sequence: Synthetic oligonucleotide
  Sense strand starting at position 3001 of SEQ ID NO: 1889085
guuaaagaucuucggacag

SEQ ID NO: 2578245 - RNA, 19 nt, Artificial Sequence
  Description of Artificial Sequence: Synthetic oligonucleotide
  Antisense strand to SEQ ID NO: 2578244
cuguccgaagaucuuuaac

SEQ ID NO: 2578246 - RNA, 19 nt, Artificial Sequence
  Description of Artificial Sequence: Synthetic oligonucleotide
  Sense strand starting at position 3030 of SEQ ID NO: 1889085
gaaucuaaucgccaggagu

SEQ ID NO: 2578247 - RNA, 19 nt, Artificial Sequence
  Description of Artificial Sequence: Synthetic oligonucleotide
  Antisense strand to SEQ ID NO: 2578246
acuccuggcgauuagauuc

SEQ ID NO: 2578248 - RNA, 19 nt, Artificial Sequence
  Description of Artificial Sequence: Synthetic oligonucleotide
  Sense strand starting at position 3096 of SEQ ID NO: 1889085
gggagaacagcucgauuau

SEQ ID NO: 2578249 - RNA, 19 nt, Artificial Sequence
  Description of Artificial Sequence: Synthetic oligonucleotide
  Antisense strand to SEQ ID NO: 2578248
auaaucgagcuguucuccc

SEQ ID NO: 2578250 - RNA, 19 nt, Artificial Sequence
  Description of Artificial Sequence: Synthetic oligonucleotide
  Sense strand starting at position 3097 of SEQ ID NO: 1889085
ggagaacagcucgauuauu

SEQ ID NO: 2578251 - RNA, 19 nt, Artificial Sequence
  Description of Artificial Sequence: Synthetic oligonucleotide
  Antisense strand to SEQ ID NO: 2578250
aauaaucgagcuguucucc

SEQ ID NO: 2578252 - RNA, 19 nt, Artificial Sequence
  Description of Artificial Sequence: Synthetic oligonucleotide
  Sense strand starting at position 3150 of SEQ ID NO: 1889085
auacaaucccuuggcagaa

SEQ ID NO: 2578253 - RNA, 19 nt, Artificial Sequence
  Description of Artificial Sequence: Synthetic oligonucleotide
  Antisense strand to SEQ ID NO: 2578252
uucugccaagggauuguau

SEQ ID NO: 2578254 - RNA, 19 nt, Artificial Sequence
  Description of Artificial Sequence: Synthetic oligonucleotide
  Sense strand starting at position 3196 of SEQ ID NO: 1889085
ucuagauagcuguagacca

SEQ ID NO: 2578255 - RNA, 19 nt, Artificial Sequence
  Description of Artificial Sequence: Synthetic oligonucleotide
  Antisense strand to SEQ ID NO: 2578254
uggucuacagcuaucuaga

SEQ ID NO: 2578256 - RNA, 19 nt, Artificial Sequence
  Description of Artificial Sequence: Synthetic oligonucleotide
  Sense strand starting at position 3263 of SEQ ID NO: 1889085
accagaacgucuucucaug

SEQ ID NO: 2578257 - RNA, 19 nt, Artificial Sequence
  Description of Artificial Sequence: Synthetic oligonucleotide
  Antisense strand to SEQ ID NO: 2578256
caugagaagacguucuggu

SEQ ID NO: 2578258 - RNA, 19 nt, Artificial Sequence
  Description of Artificial Sequence: Synthetic oligonucleotide
  Sense strand starting at position 3368 of SEQ ID NO: 1889085
augagugguagccaaacuu

SEQ ID NO: 2578259 - RNA, 19 nt, Artificial Sequence
  Description of Artificial Sequence: Synthetic oligonucleotide
  Antisense strand to SEQ ID NO: 2578258
aaguuuggcuaccacucau

SEQ ID NO: 2578260 - RNA, 19 nt, Artificial Sequence
  Description of Artificial Sequence: Synthetic oligonucleotide
  Sense strand starting at position 3393 of SEQ ID NO: 1889085
cugccauucugacuagauc

SEQ ID NO: 2578261 - RNA, 19 nt, Artificial Sequence
  Description of Artificial Sequence: Synthetic oligonucleotide
  Antisense strand to SEQ ID NO: 2578260
gaucuagucagaauggcag

SEQ ID NO: 2578262 - RNA, 19 nt, Artificial Sequence
  Description of Artificial Sequence: Synthetic oligonucleotide
  Sense strand starting at position 3537 of SEQ ID NO: 1889085
ugcacugaggccuaauaaa

SEQ ID NO: 2578263 - RNA, 19 nt, Artificial Sequence
  Description of Artificial Sequence: Synthetic oligonucleotide
  Antisense strand to SEQ ID NO: 2578262
uuuauuaggccucagugca

SEQ ID NO: 2578264 - RNA, 19 nt, Artificial Sequence
  Description of Artificial Sequence: Synthetic oligonucleotide
  Sense strand starting at position 320 of SEQ ID NO: 1889089
gggagugucugcugacagu

SEQ ID NO: 2578265 - RNA, 19 nt, Artificial Sequence
  Description of Artificial Sequence: Synthetic oligonucleotide
  Antisense strand to SEQ ID NO: 2578264
acugucagcagacacuccc

SEQ ID NO: 2578266 - RNA, 19 nt, Artificial Sequence
  Description of Artificial Sequence: Synthetic oligonucleotide
  Sense strand starting at position 323 of SEQ ID NO: 1889089
agugucugcugacagugau

SEQ ID NO: 2578267 - RNA, 19 nt, Artificial Sequence
  Description of Artificial Sequence: Synthetic oligonucleotide
  Antisense strand to SEQ ID NO: 2578266
aucacugucagcagacacu

SEQ ID NO: 2578268 - RNA, 19 nt, Artificial Sequence
  Description of Artificial Sequence: Synthetic oligonucleotide
  Sense strand starting at position 362 of SEQ ID NO: 1889089
ccacaugauguccauagca

SEQ ID NO: 2578269 - RNA, 19 nt, Artificial Sequence
  Description of Artificial Sequence: Synthetic oligonucleotide
  Antisense strand to SEQ ID NO: 2578268
ugcuauggacaucaugugg

SEQ ID NO: 2578270 - RNA, 19 nt, Artificial Sequence
  Description of Artificial Sequence: Synthetic oligonucleotide
  Sense strand starting at position 364 of SEQ ID NO: 1889089
acaugauguccauagcaca

SEQ ID NO: 2578271 - RNA, 19 nt, Artificial Sequence
  Description of Artificial Sequence: Synthetic oligonucleotide
  Antisense strand to SEQ ID NO: 2578270
ugugcuauggacaucaugu

SEQ ID NO: 2578272 - RNA, 19 nt, Artificial Sequence
  Description of Artificial Sequence: Synthetic oligonucleotide
  Sense strand starting at position 502 of SEQ ID NO: 1889089
cugugccuuugccaggaau

SEQ ID NO: 2578273 - RNA, 19 nt, Artificial Sequence
  Description of Artificial Sequence: Synthetic oligonucleotide
  Antisense strand to SEQ ID NO: 2578272
auuccuggcaaaggcacag

SEQ ID NO: 2578274 - RNA, 19 nt, Artificial Sequence
  Description of Artificial Sequence: Synthetic oligonucleotide
  Sense strand starting at position 504 of SEQ ID NO: 1889089
gugccuuugccaggaaugu

SEQ ID NO: 2578275 - RNA, 19 nt, Artificial Sequence
  Description of Artificial Sequence: Synthetic oligonucleotide
  Antisense strand to SEQ ID NO: 2578274
acauuccuggcaaaggcac

SEQ ID NO: 2578276 - RNA, 19 nt, Artificial Sequence
  Description of Artificial Sequence: Synthetic oligonucleotide
  Sense strand starting at position 505 of SEQ ID NO: 1889089
ugccuuugccaggaauguu

SEQ ID NO: 2578277 - RNA, 19 nt, Artificial Sequence
  Description of Artificial Sequence: Synthetic oligonucleotide
  Antisense strand to SEQ ID NO: 2578276
aacauuccuggcaaaggca

SEQ ID NO: 2578278 - RNA, 19 nt, Artificial Sequence
  Description of Artificial Sequence: Synthetic oligonucleotide
  Sense strand starting at position 611 of SEQ ID NO: 1889089
agaccuuccugaugccaga

SEQ ID NO: 2578279 - RNA, 19 nt, Artificial Sequence
  Description of Artificial Sequence: Synthetic oligonucleotide
  Antisense strand to SEQ ID NO: 2578278
ucuggcaucaggaaggucu

SEQ ID NO: 2578280 - RNA, 19 nt, Artificial Sequence
  Description of Artificial Sequence: Synthetic oligonucleotide
  Sense strand starting at position 697 of SEQ ID NO: 1889089
ggagaguaaggcugagagu

SEQ ID NO: 2578281 - RNA, 19 nt, Artificial Sequence
  Description of Artificial Sequence: Synthetic oligonucleotide
  Antisense strand to SEQ ID NO: 2578280
acucucagccuuacucucc

SEQ ID NO: 2578282 - RNA, 19 nt, Artificial Sequence
  Description of Artificial Sequence: Synthetic oligonucleotide
  Sense strand starting at position 839 of SEQ ID NO: 1889089
uggucugggcucugagaaa

SEQ ID NO: 2578283 - RNA, 19 nt, Artificial Sequence
  Description of Artificial Sequence: Synthetic oligonucleotide
  Antisense strand to SEQ ID NO: 2578282
uuucucagagcccagacca

SEQ ID NO: 2578284 - RNA, 19 nt, Artificial Sequence
  Description of Artificial Sequence: Synthetic oligonucleotide
  Sense strand starting at position 933 of SEQ ID NO: 1889089
gaugccuucccagggaacu

SEQ ID NO: 2578285 - RNA, 19 nt, Artificial Sequence
  Description of Artificial Sequence: Synthetic oligonucleotide
  Antisense strand to SEQ ID NO: 2578284
aguucccugggaaggcauc

SEQ ID NO: 2578286 - RNA, 19 nt, Artificial Sequence
  Description of Artificial Sequence: Synthetic oligonucleotide
  Sense strand starting at position 1304 of SEQ ID NO: 1889089
cugccucucccaggaagau

SEQ ID NO: 2578287 - RNA, 19 nt, Artificial Sequence
  Description of Artificial Sequence: Synthetic oligonucleotide
  Antisense strand to SEQ ID NO: 2578286
aucuuccugggagaggcag

SEQ ID NO: 2578288 - RNA, 19 nt, Artificial Sequence
  Description of Artificial Sequence: Synthetic oligonucleotide
  Sense strand starting at position 1603 of SEQ ID NO: 1889089
ggcugucugugauguggua

SEQ ID NO: 2578289 - RNA, 19 nt, Artificial Sequence
  Description of Artificial Sequence: Synthetic oligonucleotide
  Antisense strand to SEQ ID NO: 2578288
uaccacaucacagacagcc

SEQ ID NO: 2578290 - RNA, 19 nt, Artificial Sequence
  Description of Artificial Sequence: Synthetic oligonucleotide
  Sense strand starting at position 1605 of SEQ ID NO: 1889089
cugucugugaugugguagu

SEQ ID NO: 2578291 - RNA, 19 nt, Artificial Sequence
  Description of Artificial Sequence: Synthetic oligonucleotide
  Antisense strand to SEQ ID NO: 2578290
acuaccacaucacagacag

SEQ ID NO: 2578292 - RNA, 19 nt, Artificial Sequence
  Description of Artificial Sequence: Synthetic oligonucleotide
  Sense strand starting at position 1666 of SEQ ID NO: 1889089
ggagcucggccauauugau

SEQ ID NO: 2578293 - RNA, 19 nt, Artificial Sequence
  Description of Artificial Sequence: Synthetic oligonucleotide
  Antisense strand to SEQ ID NO: 2578292
aucaauauggccgagcucc

SEQ ID NO: 2578294 - RNA, 19 nt, Artificial Sequence
  Description of Artificial Sequence: Synthetic oligonucleotide
  Sense strand starting at position 1968 of SEQ ID NO: 1889089
cugaaucagcauugcugaa

SEQ ID NO: 2578295 - RNA, 19 nt, Artificial Sequence
  Description of Artificial Sequence: Synthetic oligonucleotide
  Antisense strand to SEQ ID NO: 2578294
uucagcaaugcugauucag

SEQ ID NO: 2578296 - RNA, 19 nt, Artificial Sequence
  Description of Artificial Sequence: Synthetic oligonucleotide
  Sense strand starting at position 2172 of SEQ ID NO: 1889089
uuccgugaucuuggaguca

SEQ ID NO: 2578297 - RNA, 19 nt, Artificial Sequence
  Description of Artificial Sequence: Synthetic oligonucleotide
  Antisense strand to SEQ ID NO: 2578296
ugacuccaagaucacggaa

SEQ ID NO: 2578298 - RNA, 19 nt, Artificial Sequence
  Description of Artificial Sequence: Synthetic oligonucleotide
  Sense strand starting at position 2216 of SEQ ID NO: 1889089
gcaacagaucuccauuggu

SEQ ID NO: 2578299 - RNA, 19 nt, Artificial Sequence
  Description of Artificial Sequence: Synthetic oligonucleotide
  Antisense strand to SEQ ID NO: 2578298
accaauggagaucuguugc

SEQ ID NO: 2578300 - RNA, 19 nt, Artificial Sequence
  Description of Artificial Sequence: Synthetic oligonucleotide
  Sense strand starting at position 2219 of SEQ ID NO: 1889089
acagaucuccauuggugaa

SEQ ID NO: 2578301 - RNA, 19 nt, Artificial Sequence
  Description of Artificial Sequence: Synthetic oligonucleotide
  Antisense strand to SEQ ID NO: 2578300
uucaccaauggagaucugu

SEQ ID NO: 2578302 - RNA, 19 nt, Artificial Sequence
  Description of Artificial Sequence: Synthetic oligonucleotide
  Sense strand starting at position 2222 of SEQ ID NO: 1889089
gaucuccauuggugaagga

SEQ ID NO: 2578303 - RNA, 19 nt, Artificial Sequence
  Description of Artificial Sequence: Synthetic oligonucleotide
  Antisense strand to SEQ ID NO: 2578302
uccuucaccaauggagauc

SEQ ID NO: 2578304 - RNA, 19 nt, Artificial Sequence
  Description of Artificial Sequence: Synthetic oligonucleotide
  Sense strand starting at position 2460 of SEQ ID NO: 1889089
ggagaaauauaguggagcu

SEQ ID NO: 2578305 - RNA, 19 nt, Artificial Sequence
  Description of Artificial Sequence: Synthetic oligonucleotide
  Antisense strand to SEQ ID NO: 2578304
agcuccacuauauuucucc

SEQ ID NO: 2578306 - RNA, 19 nt, Artificial Sequence
  Description of Artificial Sequence: Synthetic oligonucleotide
  Sense strand starting at position 2555 of SEQ ID NO: 1889089
guacaucauccugggugaa

SEQ ID NO: 2578307 - RNA, 19 nt, Artificial Sequence
  Description of Artificial Sequence: Synthetic oligonucleotide
  Antisense strand to SEQ ID NO: 2578306
uucacccaggaugauguac

SEQ ID NO: 2578308 - RNA, 19 nt, Artificial Sequence
  Description of Artificial Sequence: Synthetic oligonucleotide
  Sense strand starting at position 2590 of SEQ ID NO: 1889089
agugucgugcccuguaguu

SEQ ID NO: 2578309 - RNA, 19 nt, Artificial Sequence
  Description of Artificial Sequence: Synthetic oligonucleotide
  Antisense strand to SEQ ID NO: 2578308
aacuacagggcacgacacu

SEQ ID NO: 2578310 - RNA, 19 nt, Artificial Sequence
  Description of Artificial Sequence: Synthetic oligonucleotide
  Sense strand starting at position 2853 of SEQ ID NO: 1889089
ggcauagugcuguggguua

SEQ ID NO: 2578311 - RNA, 19 nt, Artificial Sequence
  Description of Artificial Sequence: Synthetic oligonucleotide
  Antisense strand to SEQ ID NO: 2578310
uaacccacagcacuaugcc

SEQ ID NO: 2578312 - RNA, 19 nt, Artificial Sequence
  Description of Artificial Sequence: Synthetic oligonucleotide
  Sense strand starting at position 2864 of SEQ ID NO: 1889089
guggguuagugcucaggua

SEQ ID NO: 2578313 - RNA, 19 nt, Artificial Sequence
  Description of Artificial Sequence: Synthetic oligonucleotide
  Antisense strand to SEQ ID NO: 2578312
uaccugagcacuaacccac

SEQ ID NO: 2578314 - RNA, 19 nt, Artificial Sequence
  Description of Artificial Sequence: Synthetic oligonucleotide
  Sense strand starting at position 3642 of SEQ ID NO: 1889089
gcucgaguucacuguagug

SEQ ID NO: 2578315 - RNA, 19 nt, Artificial Sequence
  Description of Artificial Sequence: Synthetic oligonucleotide
  Antisense strand to SEQ ID NO: 2578314
cacuacagugaacucgagc

SEQ ID NO: 2578316 - RNA, 19 nt, Artificial Sequence
  Description of Artificial Sequence: Synthetic oligonucleotide
  Sense strand starting at position 3795 of SEQ ID NO: 1889089
gggugaaauugguaaagac

SEQ ID NO: 2578317 - RNA, 19 nt, Artificial Sequence
  Description of Artificial Sequence: Synthetic oligonucleotide
  Antisense strand to SEQ ID NO: 2578316
gucuuuaccaauuucaccc

SEQ ID NO: 2578318 - RNA, 19 nt, Artificial Sequence
  Description of Artificial Sequence: Synthetic oligonucleotide
  Sense strand starting at position 3836 of SEQ ID NO: 1889089
augcauggcucagcuagau

SEQ ID NO: 2578319 - RNA, 19 nt, Artificial Sequence
  Description of Artificial Sequence: Synthetic oligonucleotide
  Antisense strand to SEQ ID NO: 2578318
aucuagcugagccaugcau

SEQ ID NO: 2578320 - RNA, 19 nt, Artificial Sequence
  Description of Artificial Sequence: Synthetic oligonucleotide
  Sense strand starting at position 3896 of SEQ ID NO: 1889089
ucauaauggccauagguau

SEQ ID NO: 2578321 - RNA, 19 nt, Artificial Sequence
  Description of Artificial Sequence: Synthetic oligonucleotide
  Antisense strand to SEQ ID NO: 2578320
auaccuauggccauuauga

SEQ ID NO: 2578322 - RNA, 19 nt, Artificial Sequence
  Description of Artificial Sequence: Synthetic oligonucleotide
  Sense strand starting at position 3909 of SEQ ID NO: 1889089
agguauuguccucauacuc

SEQ ID NO: 2578323 - RNA, 19 nt, Artificial Sequence
  Description of Artificial Sequence: Synthetic oligonucleotide
  Antisense strand to SEQ ID NO: 2578322
gaguaugaggacaauaccu

SEQ ID NO: 2578324 - RNA, 19 nt, Artificial Sequence
  Description of Artificial Sequence: Synthetic oligonucleotide
  Sense strand starting at position 319 of SEQ ID NO: 1889090
ccgggagugucugcugaca

SEQ ID NO: 2578325 - RNA, 19 nt, Artificial Sequence
  Description of Artificial Sequence: Synthetic oligonucleotide
  Antisense strand to SEQ ID NO: 2578324
ugucagcagacacucccgg

SEQ ID NO: 2578326 - RNA, 19 nt, Artificial Sequence
  Description of Artificial Sequence: Synthetic oligonucleotide
  Sense strand starting at position 321 of SEQ ID NO: 1889090
gggagugucugcugacagu

SEQ ID NO: 2578327 - RNA, 19 nt, Artificial Sequence
  Description of Artificial Sequence: Synthetic oligonucleotide
  Antisense strand to SEQ ID NO: 2578326
acugucagcagacacuccc

SEQ ID NO: 2578328 - RNA, 19 nt, Artificial Sequence
  Description of Artificial Sequence: Synthetic oligonucleotide
  Sense strand starting at position 324 of SEQ ID NO: 1889090
agugucugcugacagugau

SEQ ID NO: 2578329 - RNA, 19 nt, Artificial Sequence
  Description of Artificial Sequence: Synthetic oligonucleotide
  Antisense strand to SEQ ID NO: 2578328
aucacugucagcagacacu

SEQ ID NO: 2578330 - RNA, 19 nt, Artificial Sequence
  Description of Artificial Sequence: Synthetic oligonucleotide
  Sense strand starting at position 363 of SEQ ID NO: 1889090
ccacaugauguccauagca

SEQ ID NO: 2578331 - RNA, 19 nt, Artificial Sequence
  Description of Artificial Sequence: Synthetic oligonucleotide
  Antisense strand to SEQ ID NO: 2578330
ugcuauggacaucaugugg

SEQ ID NO: 2578332 - RNA, 19 nt, Artificial Sequence
  Description of Artificial Sequence: Synthetic oligonucleotide
  Sense strand starting at position 365 of SEQ ID NO: 1889090
acaugauguccauagcaca

SEQ ID NO: 2578333 - RNA, 19 nt, Artificial Sequence
  Description of Artificial Sequence: Synthetic oligonucleotide
  Antisense strand to SEQ ID NO: 2578332
ugugcuauggacaucaugu

SEQ ID NO: 2578334 - RNA, 19 nt, Artificial Sequence
  Description of Artificial Sequence: Synthetic oligonucleotide
  Sense strand starting at position 503 of SEQ ID NO: 1889090
cugugccuuugccaggaau

SEQ ID NO: 2578335 - RNA, 19 nt, Artificial Sequence
  Description of Artificial Sequence: Synthetic oligonucleotide
  Antisense strand to SEQ ID NO: 2578334
auuccuggcaaaggcacag

SEQ ID NO: 2578336 - RNA, 19 nt, Artificial Sequence
  Description of Artificial Sequence: Synthetic oligonucleotide
  Sense strand starting at position 505 of SEQ ID NO: 1889090
gugccuuugccaggaaugu

SEQ ID NO: 2578337 - RNA, 19 nt, Artificial Sequence
  Description of Artificial Sequence: Synthetic oligonucleotide
  Antisense strand to SEQ ID NO: 2578336
acauuccuggcaaaggcac

SEQ ID NO: 2578338 - RNA, 19 nt, Artificial Sequence
  Description of Artificial Sequence: Synthetic oligonucleotide
  Sense strand starting at position 506 of SEQ ID NO: 1889090
ugccuuugccaggaauguu

SEQ ID NO: 2578339 - RNA, 19 nt, Artificial Sequence
  Description of Artificial Sequence: Synthetic oligonucleotide
  Antisense strand to SEQ ID NO: 2578338
aacauuccuggcaaaggca

SEQ ID NO: 2578340 - RNA, 19 nt, Artificial Sequence
  Description of Artificial Sequence: Synthetic oligonucleotide
  Sense strand starting at position 612 of SEQ ID NO: 1889090
agaccuuccugaugccaga

SEQ ID NO: 2578341 - RNA, 19 nt, Artificial Sequence
  Description of Artificial Sequence: Synthetic oligonucleotide
  Antisense strand to SEQ ID NO: 2578340
ucuggcaucaggaaggucu

SEQ ID NO: 2578342 - RNA, 19 nt, Artificial Sequence
  Description of Artificial Sequence: Synthetic oligonucleotide
  Sense strand starting at position 698 of SEQ ID NO: 1889090
ggagaguaaggcugagagu

SEQ ID NO: 2578343 - RNA, 19 nt, Artificial Sequence
  Description of Artificial Sequence: Synthetic oligonucleotide
  Antisense strand to SEQ ID NO: 2578342
acucucagccuuacucucc

SEQ ID NO: 2578344 - RNA, 19 nt, Artificial Sequence
  Description of Artificial Sequence: Synthetic oligonucleotide
  Sense strand starting at position 740 of SEQ ID NO: 1889090
cagggcaugucagugagau

SEQ ID NO: 2578345 - RNA, 19 nt, Artificial Sequence
  Description of Artificial Sequence: Synthetic oligonucleotide
  Antisense strand to SEQ ID NO: 2578344
aucucacugacaugcccug

SEQ ID NO: 2578346 - RNA, 19 nt, Artificial Sequence
  Description of Artificial Sequence: Synthetic oligonucleotide
  Sense strand starting at position 741 of SEQ ID NO: 1889090
agggcaugucagugagauc

SEQ ID NO: 2578347 - RNA, 19 nt, Artificial Sequence
  Description of Artificial Sequence: Synthetic oligonucleotide
  Antisense strand to SEQ ID NO: 2578346
gaucucacugacaugcccu

SEQ ID NO: 2578348 - RNA, 19 nt, Artificial Sequence
  Description of Artificial Sequence: Synthetic oligonucleotide
  Sense strand starting at position 742 of SEQ ID NO: 1889090
gggcaugucagugagaucu

SEQ ID NO: 2578349 - RNA, 19 nt, Artificial Sequence
  Description of Artificial Sequence: Synthetic oligonucleotide
  Antisense strand to SEQ ID NO: 2578348
agaucucacugacaugccc

SEQ ID NO: 2578350 - RNA, 19 nt, Artificial Sequence
  Description of Artificial Sequence: Synthetic oligonucleotide
  Sense strand starting at position 744 of SEQ ID NO: 1889090
gcaugucagugagaucucu

SEQ ID NO: 2578351 - RNA, 19 nt, Artificial Sequence
  Description of Artificial Sequence: Synthetic oligonucleotide
  Antisense strand to SEQ ID NO: 2578350
agagaucucacugacaugc

SEQ ID NO: 2578352 - RNA, 19 nt, Artificial Sequence
  Description of Artificial Sequence: Synthetic oligonucleotide
  Sense strand starting at position 750 of SEQ ID NO: 1889090
cagugagaucucuggaagg

SEQ ID NO: 2578353 - RNA, 19 nt, Artificial Sequence
  Description of Artificial Sequence: Synthetic oligonucleotide
  Antisense strand to SEQ ID NO: 2578352
ccuuccagagaucucacug

SEQ ID NO: 2578354 - RNA, 19 nt, Artificial Sequence
  Description of Artificial Sequence: Synthetic oligonucleotide
  Sense strand starting at position 934 of SEQ ID NO: 1889090
gaugccuucccagggaacu

SEQ ID NO: 2578355 - RNA, 19 nt, Artificial Sequence
  Description of Artificial Sequence: Synthetic oligonucleotide
  Antisense strand to SEQ ID NO: 2578354
aguucccugggaaggcauc

SEQ ID NO: 2578356 - RNA, 19 nt, Artificial Sequence
  Description of Artificial Sequence: Synthetic oligonucleotide
  Sense strand starting at position 2162 of SEQ ID NO: 1889090
ggcauaucaucuuccguga

SEQ ID NO: 2578357 - RNA, 19 nt, Artificial Sequence
  Description of Artificial Sequence: Synthetic oligonucleotide
  Antisense strand to SEQ ID NO: 2578356
ucacggaagaugauaugcc

SEQ ID NO: 2578358 - RNA, 19 nt, Artificial Sequence
  Description of Artificial Sequence: Synthetic oligonucleotide
  Sense strand starting at position 2165 of SEQ ID NO: 1889090
auaucaucuuccgugaucu

SEQ ID NO: 2578359 - RNA, 19 nt, Artificial Sequence
  Description of Artificial Sequence: Synthetic oligonucleotide
  Antisense strand to SEQ ID NO: 2578358
agaucacggaagaugauau

SEQ ID NO: 2578360 - RNA, 19 nt, Artificial Sequence
  Description of Artificial Sequence: Synthetic oligonucleotide
  Sense strand starting at position 2173 of SEQ ID NO: 1889090
uuccgugaucuuggaguca

SEQ ID NO: 2578361 - RNA, 19 nt, Artificial Sequence
  Description of Artificial Sequence: Synthetic oligonucleotide
  Antisense strand to SEQ ID NO: 2578360
ugacuccaagaucacggaa

SEQ ID NO: 2578362 - RNA, 19 nt, Artificial Sequence
  Description of Artificial Sequence: Synthetic oligonucleotide
  Sense strand starting at position 2217 of SEQ ID NO: 1889090
gcaacagaucuccauuggu

SEQ ID NO: 2578363 - RNA, 19 nt, Artificial Sequence
  Description of Artificial Sequence: Synthetic oligonucleotide
  Antisense strand to SEQ ID NO: 2578362
accaauggagaucuguugc

SEQ ID NO: 2578364 - RNA, 19 nt, Artificial Sequence
  Description of Artificial Sequence: Synthetic oligonucleotide
  Sense strand starting at position 2220 of SEQ ID NO: 1889090
acagaucuccauuggugaa

SEQ ID NO: 2578365 - RNA, 19 nt, Artificial Sequence
  Description of Artificial Sequence: Synthetic oligonucleotide
  Antisense strand to SEQ ID NO: 2578364
uucaccaauggagaucugu

SEQ ID NO: 2578366 - RNA, 19 nt, Artificial Sequence
  Description of Artificial Sequence: Synthetic oligonucleotide
  Sense strand starting at position 2223 of SEQ ID NO: 1889090
gaucuccauuggugaagga

SEQ ID NO: 2578367 - RNA, 19 nt, Artificial Sequence
  Description of Artificial Sequence: Synthetic oligonucleotide
  Antisense strand to SEQ ID NO: 2578366
uccuucaccaauggagauc

SEQ ID NO: 2578368 - RNA, 19 nt, Artificial Sequence
  Description of Artificial Sequence: Synthetic oligonucleotide
  Sense strand starting at position 2331 of SEQ ID NO: 1889090
uguugaggcucuugacgaa

SEQ ID NO: 2578369 - RNA, 19 nt, Artificial Sequence
  Description of Artificial Sequence: Synthetic oligonucleotide
  Antisense strand to SEQ ID NO: 2578368
uucgucaagagccucaaca

SEQ ID NO: 2578370 - RNA, 19 nt, Artificial Sequence
  Description of Artificial Sequence: Synthetic oligonucleotide
  Sense strand starting at position 2431 of SEQ ID NO: 1889090
gccaguauggauggagaaa

SEQ ID NO: 2578371 - RNA, 19 nt, Artificial Sequence
  Description of Artificial Sequence: Synthetic oligonucleotide
  Antisense strand to SEQ ID NO: 2578370
uuucuccauccauacuggc

SEQ ID NO: 2578372 - RNA, 19 nt, Artificial Sequence
  Description of Artificial Sequence: Synthetic oligonucleotide
  Sense strand starting at position 2555 of SEQ ID NO: 1889090
uguacaucauccuggguga

SEQ ID NO: 2578373 - RNA, 19 nt, Artificial Sequence
  Description of Artificial Sequence: Synthetic oligonucleotide
  Antisense strand to SEQ ID NO: 2578372
ucacccaggaugauguaca

SEQ ID NO: 2578374 - RNA, 19 nt, Artificial Sequence
  Description of Artificial Sequence: Synthetic oligonucleotide
  Sense strand starting at position 2556 of SEQ ID NO: 1889090
guacaucauccugggugaa

SEQ ID NO: 2578375 - RNA, 19 nt, Artificial Sequence
  Description of Artificial Sequence: Synthetic oligonucleotide
  Antisense strand to SEQ ID NO: 2578374
uucacccaggaugauguac

SEQ ID NO: 2578376 - RNA, 19 nt, Artificial Sequence
  Description of Artificial Sequence: Synthetic oligonucleotide
  Sense strand starting at position 2591 of SEQ ID NO: 1889090
agugucgugcccuguaguu

SEQ ID NO: 2578377 - RNA, 19 nt, Artificial Sequence
  Description of Artificial Sequence: Synthetic oligonucleotide
  Antisense strand to SEQ ID NO: 2578376
aacuacagggcacgacacu

SEQ ID NO: 2578378 - RNA, 19 nt, Artificial Sequence
  Description of Artificial Sequence: Synthetic oligonucleotide
  Sense strand starting at position 2854 of SEQ ID NO: 1889090
ggcauagugcuguggguua

SEQ ID NO: 2578379 - RNA, 19 nt, Artificial Sequence
  Description of Artificial Sequence: Synthetic oligonucleotide
  Antisense strand to SEQ ID NO: 2578378
uaacccacagcacuaugcc

SEQ ID NO: 2578380 - RNA, 19 nt, Artificial Sequence
  Description of Artificial Sequence: Synthetic oligonucleotide
  Sense strand starting at position 3643 of SEQ ID NO: 1889090
gcucgaguucacuguagug

SEQ ID NO: 2578381 - RNA, 19 nt, Artificial Sequence
  Description of Artificial Sequence: Synthetic oligonucleotide
  Antisense strand to SEQ ID NO: 2578380
cacuacagugaacucgagc

SEQ ID NO: 2578382 - RNA, 19 nt, Artificial Sequence
  Description of Artificial Sequence: Synthetic oligonucleotide
  Sense strand starting at position 3837 of SEQ ID NO: 1889090
augcauggcucagcuagau

SEQ ID NO: 2578383 - RNA, 19 nt, Artificial Sequence
  Description of Artificial Sequence: Synthetic oligonucleotide
  Antisense strand to SEQ ID NO: 2578382
aucuagcugagccaugcau

SEQ ID NO: 2578384 - RNA, 19 nt, Artificial Sequence
  Description of Artificial Sequence: Synthetic oligonucleotide
  Sense strand starting at position 3897 of SEQ ID NO: 1889090
ucauaauggccauagguau

SEQ ID NO: 2578385 - RNA, 19 nt, Artificial Sequence
  Description of Artificial Sequence: Synthetic oligonucleotide
  Antisense strand to SEQ ID NO: 2578384
auaccuauggccauuauga

SEQ ID NO: 2578386 - RNA, 19 nt, Artificial Sequence
  Description of Artificial Sequence: Synthetic oligonucleotide
  Sense strand starting at position 3910 of SEQ ID NO: 1889090
agguauuguccucauacuc

SEQ ID NO: 2578387 - RNA, 19 nt, Artificial Sequence
  Description of Artificial Sequence: Synthetic oligonucleotide
  Antisense strand to SEQ ID NO: 2578386
gaguaugaggacaauaccu

SEQ ID NO: 2578388 - RNA, 19 nt, Artificial Sequence
  Description of Artificial Sequence: Synthetic oligonucleotide
  Sense strand starting at position 3743 of SEQ ID NO: 1889092
cugagaaacuggucccaca

SEQ ID NO: 2578389 - RNA, 19 nt, Artificial Sequence
  Description of Artificial Sequence: Synthetic oligonucleotide
  Antisense strand to SEQ ID NO: 2578388
ugugggaccaguuucucag

SEQ ID NO: 2578390 - RNA, 19 nt, Artificial Sequence
  Description of Artificial Sequence: Synthetic oligonucleotide
  Sense strand starting at position 2757 of SEQ ID NO: 1889094
gggaauugcguggguccau

SEQ ID NO: 2578391 - RNA, 19 nt, Artificial Sequence
  Description of Artificial Sequence: Synthetic oligonucleotide
  Antisense strand to SEQ ID NO: 2578390
auggacccacgcaauuccc

SEQ ID NO: 2578392 - RNA, 19 nt, Artificial Sequence
  Description of Artificial Sequence: Synthetic oligonucleotide
  Sense strand starting at position 2758 of SEQ ID NO: 1889094
ggaauugcguggguccaua

SEQ ID NO: 2578393 - RNA, 19 nt, Artificial Sequence
  Description of Artificial Sequence: Synthetic oligonucleotide
  Antisense strand to SEQ ID NO: 2578392
uauggacccacgcaauucc

SEQ ID NO: 2578394 - RNA, 19 nt, Artificial Sequence
  Description of Artificial Sequence: Synthetic oligonucleotide
  Sense strand starting at position 1533 of SEQ ID NO: 1889095
ggcccugggugaugaucua

SEQ ID NO: 2578395 - RNA, 19 nt, Artificial Sequence
  Description of Artificial Sequence: Synthetic oligonucleotide
  Antisense strand to SEQ ID NO: 2578394
uagaucaucacccagggcc

SEQ ID NO: 2578396 - RNA, 19 nt, Artificial Sequence
  Description of Artificial Sequence: Synthetic oligonucleotide
  Sense strand starting at position 1539 of SEQ ID NO: 1889095
gggugaugaucuaggugac

SEQ ID NO: 2578397 - RNA, 19 nt, Artificial Sequence
  Description of Artificial Sequence: Synthetic oligonucleotide
  Antisense strand to SEQ ID NO: 2578396
gucaccuagaucaucaccc

SEQ ID NO: 2578398 - RNA, 19 nt, Artificial Sequence
  Description of Artificial Sequence: Synthetic oligonucleotide
  Sense strand starting at position 1540 of SEQ ID NO: 1889095
ggugaugaucuaggugacu

SEQ ID NO: 2578399 - RNA, 19 nt, Artificial Sequence
  Description of Artificial Sequence: Synthetic oligonucleotide
  Antisense strand to SEQ ID NO: 2578398
agucaccuagaucaucacc

SEQ ID NO: 2578400 - RNA, 19 nt, Artificial Sequence
  Description of Artificial Sequence: Synthetic oligonucleotide
  Sense strand starting at position 1546 of SEQ ID NO: 1889095
gaucuaggugacugcagaa

SEQ ID NO: 2578401 - RNA, 19 nt, Artificial Sequence
  Description of Artificial Sequence: Synthetic oligonucleotide
  Antisense strand to SEQ ID NO: 2578400
uucugcagucaccuagauc

SEQ ID NO: 2578402 - RNA, 19 nt, Artificial Sequence
  Description of Artificial Sequence: Synthetic oligonucleotide
  Sense strand starting at position 3743 of SEQ ID NO: 1889097
cugagaaacuggucccaca

SEQ ID NO: 2578403 - RNA, 19 nt, Artificial Sequence
  Description of Artificial Sequence: Synthetic oligonucleotide
  Antisense strand to SEQ ID NO: 2578402
ugugggaccaguuucucag

SEQ ID NO: 2578404 - RNA, 19 nt, Artificial Sequence
  Description of Artificial Sequence: Synthetic oligonucleotide
  Sense strand starting at position 2757 of SEQ ID NO: 1889099
gggaauugcguggguccau

SEQ ID NO: 2578405 - RNA, 19 nt, Artificial Sequence
  Description of Artificial Sequence: Synthetic oligonucleotide
  Antisense strand to SEQ ID NO: 2578404
auggacccacgcaauuccc

SEQ ID NO: 2578406 - RNA, 19 nt, Artificial Sequence
  Description of Artificial Sequence: Synthetic oligonucleotide
  Sense strand starting at position 2758 of SEQ ID NO: 1889099
ggaauugcguggguccaua

SEQ ID NO: 2578407 - RNA, 19 nt, Artificial Sequence
  Description of Artificial Sequence: Synthetic oligonucleotide
  Antisense strand to SEQ ID NO: 2578406
uauggacccacgcaauucc

SEQ ID NO: 2578408 - RNA, 19 nt, Artificial Sequence
  Description of Artificial Sequence: Synthetic oligonucleotide
  Sense strand starting at position 1533 of SEQ ID NO: 1889100
ggcccugggugaugaucua

SEQ ID NO: 2578409 - RNA, 19 nt, Artificial Sequence
  Description of Artificial Sequence: Synthetic oligonucleotide
  Antisense strand to SEQ ID NO: 2578408
uagaucaucacccagggcc

SEQ ID NO: 2578410 - RNA, 19 nt, Artificial Sequence
  Description of Artificial Sequence: Synthetic oligonucleotide
  Sense strand starting at position 1539 of SEQ ID NO: 1889100
gggugaugaucuaggugac

SEQ ID NO: 2578411 - RNA, 19 nt, Artificial Sequence
  Description of Artificial Sequence: Synthetic oligonucleotide
  Antisense strand to SEQ ID NO: 2578410
gucaccuagaucaucaccc

SEQ ID NO: 2578412 - RNA, 19 nt, Artificial Sequence
  Description of Artificial Sequence: Synthetic oligonucleotide
  Sense strand starting at position 1540 of SEQ ID NO: 1889100
ggugaugaucuaggugacu

SEQ ID NO: 2578413 - RNA, 19 nt, Artificial Sequence
  Description of Artificial Sequence: Synthetic oligonucleotide
  Antisense strand to SEQ ID NO: 2578412
agucaccuagaucaucacc

SEQ ID NO: 2578414 - RNA, 19 nt, Artificial Sequence
  Description of Artificial Sequence: Synthetic oligonucleotide
  Sense strand starting at position 1546 of SEQ ID NO: 1889100
gaucuaggugacugcagaa

SEQ ID NO: 2578415 - RNA, 19 nt, Artificial Sequence
  Description of Artificial Sequence: Synthetic oligonucleotide
  Antisense strand to SEQ ID NO: 2578414
uucugcagucaccuagauc

SEQ ID NO: 2578416 - RNA, 19 nt, Artificial Sequence
  Description of Artificial Sequence: Synthetic oligonucleotide
  Sense strand starting at position 32 of SEQ ID NO: 1889102
cucaauuggugccaaagaa

SEQ ID NO: 2578417 - RNA, 19 nt, Artificial Sequence
  Description of Artificial Sequence: Synthetic oligonucleotide
  Antisense strand to SEQ ID NO: 2578416
uucuuuggcaccaauugag

SEQ ID NO: 2578418 - RNA, 19 nt, Artificial Sequence
  Description of Artificial Sequence: Synthetic oligonucleotide
  Sense strand starting at position 197 of SEQ ID NO: 1889102
aguacucaucgugcguuau

SEQ ID NO: 2578419 - RNA, 19 nt, Artificial Sequence
  Description of Artificial Sequence: Synthetic oligonucleotide
  Antisense strand to SEQ ID NO: 2578418
auaacgcacgaugaguacu

SEQ ID NO: 2578420 - RNA, 19 nt, Artificial Sequence
  Description of Artificial Sequence: Synthetic oligonucleotide
  Sense strand starting at position 198 of SEQ ID NO: 1889102
guacucaucgugcguuauu

SEQ ID NO: 2578421 - RNA, 19 nt, Artificial Sequence
  Description of Artificial Sequence: Synthetic oligonucleotide
  Antisense strand to SEQ ID NO: 2578420
aauaacgcacgaugaguac

SEQ ID NO: 2578422 - RNA, 19 nt, Artificial Sequence
  Description of Artificial Sequence: Synthetic oligonucleotide
  Sense strand starting at position 199 of SEQ ID NO: 1889102
uacucaucgugcguuauuu

SEQ ID NO: 2578423 - RNA, 19 nt, Artificial Sequence
  Description of Artificial Sequence: Synthetic oligonucleotide
  Antisense strand to SEQ ID NO: 2578422
aaauaacgcacgaugagua

SEQ ID NO: 2578424 - RNA, 19 nt, Artificial Sequence
  Description of Artificial Sequence: Synthetic oligonucleotide
  Sense strand starting at position 208 of SEQ ID NO: 1889102
ugcguuauuuggucuccca

SEQ ID NO: 2578425 - RNA, 19 nt, Artificial Sequence
  Description of Artificial Sequence: Synthetic oligonucleotide
  Antisense strand to SEQ ID NO: 2578424
ugggagaccaaauaacgca

SEQ ID NO: 2578426 - RNA, 19 nt, Artificial Sequence
  Description of Artificial Sequence: Synthetic oligonucleotide
  Sense strand starting at position 211 of SEQ ID NO: 1889102
guuauuuggucucccaugu

SEQ ID NO: 2578427 - RNA, 19 nt, Artificial Sequence
  Description of Artificial Sequence: Synthetic oligonucleotide
  Antisense strand to SEQ ID NO: 2578426
acaugggagaccaaauaac

SEQ ID NO: 2578428 - RNA, 19 nt, Artificial Sequence
  Description of Artificial Sequence: Synthetic oligonucleotide
  Sense strand starting at position 222 of SEQ ID NO: 1889102
ucccaugucucuugugaaa

SEQ ID NO: 2578429 - RNA, 19 nt, Artificial Sequence
  Description of Artificial Sequence: Synthetic oligonucleotide
  Antisense strand to SEQ ID NO: 2578428
uuucacaagagacauggga

SEQ ID NO: 2578430 - RNA, 19 nt, Artificial Sequence
  Description of Artificial Sequence: Synthetic oligonucleotide
  Sense strand starting at position 353 of SEQ ID NO: 1889102
gcgaaagucucagaggcuu

SEQ ID NO: 2578431 - RNA, 19 nt, Artificial Sequence
  Description of Artificial Sequence: Synthetic oligonucleotide
  Antisense strand to SEQ ID NO: 2578430
aagccucugagacuuucgc

SEQ ID NO: 2578432 - RNA, 19 nt, Artificial Sequence
  Description of Artificial Sequence: Synthetic oligonucleotide
  Sense strand starting at position 395 of SEQ ID NO: 1889102
ugaggagacuuccagaauc

SEQ ID NO: 2578433 - RNA, 19 nt, Artificial Sequence
  Description of Artificial Sequence: Synthetic oligonucleotide
  Antisense strand to SEQ ID NO: 2578432
gauucuggaagucuccuca

SEQ ID NO: 2578434 - RNA, 19 nt, Artificial Sequence
  Description of Artificial Sequence: Synthetic oligonucleotide
  Sense strand starting at position 681 of SEQ ID NO: 1889102
agagaagugcaucaagguu

SEQ ID NO: 2578435 - RNA, 19 nt, Artificial Sequence
  Description of Artificial Sequence: Synthetic oligonucleotide
  Antisense strand to SEQ ID NO: 2578434
aaccuugaugcacuucucu

SEQ ID NO: 2578436 - RNA, 19 nt, Artificial Sequence
  Description of Artificial Sequence: Synthetic oligonucleotide
  Sense strand starting at position 721 of SEQ ID NO: 1889102
uugggaguuugacauggaa

SEQ ID NO: 2578437 - RNA, 19 nt, Artificial Sequence
  Description of Artificial Sequence: Synthetic oligonucleotide
  Antisense strand to SEQ ID NO: 2578436
uuccaugucaaacucccaa

SEQ ID NO: 2578438 - RNA, 19 nt, Artificial Sequence
  Description of Artificial Sequence: Synthetic oligonucleotide
  Sense strand starting at position 867 of SEQ ID NO: 1889102
uaauguuagccgggcauga

SEQ ID NO: 2578439 - RNA, 19 nt, Artificial Sequence
  Description of Artificial Sequence: Synthetic oligonucleotide
  Antisense strand to SEQ ID NO: 2578438
ucaugcccggcuaacauua

SEQ ID NO: 2578440 - RNA, 19 nt, Artificial Sequence
  Description of Artificial Sequence: Synthetic oligonucleotide
  Sense strand starting at position 965 of SEQ ID NO: 1889102
gggccuuggucagguaaug

SEQ ID NO: 2578441 - RNA, 19 nt, Artificial Sequence
  Description of Artificial Sequence: Synthetic oligonucleotide
  Antisense strand to SEQ ID NO: 2578440
cauuaccugaccaaggccc

SEQ ID NO: 2578442 - RNA, 19 nt, Artificial Sequence
  Description of Artificial Sequence: Synthetic oligonucleotide
  Sense strand starting at position 1084 of SEQ ID NO: 1889102
ggguaucagugacagacuu

SEQ ID NO: 2578443 - RNA, 19 nt, Artificial Sequence
  Description of Artificial Sequence: Synthetic oligonucleotide
  Antisense strand to SEQ ID NO: 2578442
aagucugucacugauaccc

SEQ ID NO: 2578444 - RNA, 19 nt, Artificial Sequence
  Description of Artificial Sequence: Synthetic oligonucleotide
  Sense strand starting at position 1094 of SEQ ID NO: 1889102
gacagacuuuaguaagcau

SEQ ID NO: 2578445 - RNA, 19 nt, Artificial Sequence
  Description of Artificial Sequence: Synthetic oligonucleotide
  Antisense strand to SEQ ID NO: 2578444
augcuuacuaaagucuguc

SEQ ID NO: 2578446 - RNA, 19 nt, Artificial Sequence
  Description of Artificial Sequence: Synthetic oligonucleotide
  Sense strand starting at position 1103 of SEQ ID NO: 1889102
uaguaagcaugguuguuau

SEQ ID NO: 2578447 - RNA, 19 nt, Artificial Sequence
  Description of Artificial Sequence: Synthetic oligonucleotide
  Antisense strand to SEQ ID NO: 2578446
auaacaaccaugcuuacua

SEQ ID NO: 2578448 - RNA, 19 nt, Artificial Sequence
  Description of Artificial Sequence: Synthetic oligonucleotide
  Sense strand starting at position 1110 of SEQ ID NO: 1889102
caugguuguuaugccauau

SEQ ID NO: 2578449 - RNA, 19 nt, Artificial Sequence
  Description of Artificial Sequence: Synthetic oligonucleotide
  Antisense strand to SEQ ID NO: 2578448
auauggcauaacaaccaug

SEQ ID NO: 2578450 - RNA, 19 nt, Artificial Sequence
  Description of Artificial Sequence: Synthetic oligonucleotide
  Sense strand starting at position 1144 of SEQ ID NO: 1889102
ugaacuugaacccgggaau

SEQ ID NO: 2578451 - RNA, 19 nt, Artificial Sequence
  Description of Artificial Sequence: Synthetic oligonucleotide
  Antisense strand to SEQ ID NO: 2578450
auucccggguucaaguuca

SEQ ID NO: 2578452 - RNA, 19 nt, Artificial Sequence
  Description of Artificial Sequence: Synthetic oligonucleotide
  Sense strand starting at position 1196 of SEQ ID NO: 1889102
uacugcagucugggugaua

SEQ ID NO: 2578453 - RNA, 19 nt, Artificial Sequence
  Description of Artificial Sequence: Synthetic oligonucleotide
  Antisense strand to SEQ ID NO: 2578452
uaucacccagacugcagua

SEQ ID NO: 2578454 - RNA, 19 nt, Artificial Sequence
  Description of Artificial Sequence: Synthetic oligonucleotide
  Sense strand starting at position 1309 of SEQ ID NO: 1889102
uaaacaaacuagugagagu

SEQ ID NO: 2578455 - RNA, 19 nt, Artificial Sequence
  Description of Artificial Sequence: Synthetic oligonucleotide
  Antisense strand to SEQ ID NO: 2578454
acucucacuaguuuguuua

SEQ ID NO: 2578456 - RNA, 19 nt, Artificial Sequence
  Description of Artificial Sequence: Synthetic oligonucleotide
  Sense strand starting at position 1577 of SEQ ID NO: 1889102
cugugaugagccgagaaug

SEQ ID NO: 2578457 - RNA, 19 nt, Artificial Sequence
  Description of Artificial Sequence: Synthetic oligonucleotide
  Antisense strand to SEQ ID NO: 2578456
cauucucggcucaucacag

SEQ ID NO: 2578458 - RNA, 19 nt, Artificial Sequence
  Description of Artificial Sequence: Synthetic oligonucleotide
  Sense strand starting at position 1766 of SEQ ID NO: 1889102
gaagaaaugacguggugaa

SEQ ID NO: 2578459 - RNA, 19 nt, Artificial Sequence
  Description of Artificial Sequence: Synthetic oligonucleotide
  Antisense strand to SEQ ID NO: 2578458
uucaccacgucauuucuuc

SEQ ID NO: 2578460 - RNA, 19 nt, Artificial Sequence
  Description of Artificial Sequence: Synthetic oligonucleotide
  Sense strand starting at position 1767 of SEQ ID NO: 1889102
aagaaaugacguggugaaa

SEQ ID NO: 2578461 - RNA, 19 nt, Artificial Sequence
  Description of Artificial Sequence: Synthetic oligonucleotide
  Antisense strand to SEQ ID NO: 2578460
uuucaccacgucauuucuu

SEQ ID NO: 2578462 - RNA, 19 nt, Artificial Sequence
  Description of Artificial Sequence: Synthetic oligonucleotide
  Sense strand starting at position 1925 of SEQ ID NO: 1889102
ggaacuuuaucacaccaag

SEQ ID NO: 2578463 - RNA, 19 nt, Artificial Sequence
  Description of Artificial Sequence: Synthetic oligonucleotide
  Antisense strand to SEQ ID NO: 2578462
cuuggugugauaaaguucc

SEQ ID NO: 2578464 - RNA, 19 nt, Artificial Sequence
  Description of Artificial Sequence: Synthetic oligonucleotide
  Sense strand starting at position 2043 of SEQ ID NO: 1889102
ggcagugacugguucauau

SEQ ID NO: 2578465 - RNA, 19 nt, Artificial Sequence
  Description of Artificial Sequence: Synthetic oligonucleotide
  Antisense strand to SEQ ID NO: 2578464
auaugaaccagucacugcc

SEQ ID NO: 2578466 - RNA, 19 nt, Artificial Sequence
  Description of Artificial Sequence: Synthetic oligonucleotide
  Sense strand starting at position 2443 of SEQ ID NO: 1889102
ggaagagguucucgggaac

SEQ ID NO: 2578467 - RNA, 19 nt, Artificial Sequence
  Description of Artificial Sequence: Synthetic oligonucleotide
  Antisense strand to SEQ ID NO: 2578466
guucccgagaaccucuucc

SEQ ID NO: 2578468 - RNA, 19 nt, Artificial Sequence
  Description of Artificial Sequence: Synthetic oligonucleotide
  Sense strand starting at position 2478 of SEQ ID NO: 1889102
gguauaugucaagggcuga

SEQ ID NO: 2578469 - RNA, 19 nt, Artificial Sequence
  Description of Artificial Sequence: Synthetic oligonucleotide
  Antisense strand to SEQ ID NO: 2578468
ucagcccuugacauauacc

SEQ ID NO: 2578470 - RNA, 19 nt, Artificial Sequence
  Description of Artificial Sequence: Synthetic oligonucleotide
  Sense strand starting at position 2479 of SEQ ID NO: 1889102
guauaugucaagggcugaa

SEQ ID NO: 2578471 - RNA, 19 nt, Artificial Sequence
  Description of Artificial Sequence: Synthetic oligonucleotide
  Antisense strand to SEQ ID NO: 2578470
uucagcccuugacauauac

SEQ ID NO: 2578472 - RNA, 19 nt, Artificial Sequence
  Description of Artificial Sequence: Synthetic oligonucleotide
  Sense strand starting at position 2482 of SEQ ID NO: 1889102
uaugucaagggcugaauua

SEQ ID NO: 2578473 - RNA, 19 nt, Artificial Sequence
  Description of Artificial Sequence: Synthetic oligonucleotide
  Antisense strand to SEQ ID NO: 2578472
uaauucagcccuugacaua

SEQ ID NO: 2578474 - RNA, 19 nt, Artificial Sequence
  Description of Artificial Sequence: Synthetic oligonucleotide
  Sense strand starting at position 2603 of SEQ ID NO: 1889102
gcugcucugcuccauggaa

SEQ ID NO: 2578475 - RNA, 19 nt, Artificial Sequence
  Description of Artificial Sequence: Synthetic oligonucleotide
  Antisense strand to SEQ ID NO: 2578474
uuccauggagcagagcagc

SEQ ID NO: 2578476 - RNA, 19 nt, Artificial Sequence
  Description of Artificial Sequence: Synthetic oligonucleotide
  Sense strand starting at position 2641 of SEQ ID NO: 1889102
gacgucugcgaauaguuua

SEQ ID NO: 2578477 - RNA, 19 nt, Artificial Sequence
  Description of Artificial Sequence: Synthetic oligonucleotide
  Antisense strand to SEQ ID NO: 2578476
uaaacuauucgcagacguc

SEQ ID NO: 2578478 - RNA, 19 nt, Artificial Sequence
  Description of Artificial Sequence: Synthetic oligonucleotide
  Sense strand starting at position 2672 of SEQ ID NO: 1889102
ccacaaacacguuauguga

SEQ ID NO: 2578479 - RNA, 19 nt, Artificial Sequence
  Description of Artificial Sequence: Synthetic oligonucleotide
  Antisense strand to SEQ ID NO: 2578478
ucacauaacguguuugugg

SEQ ID NO: 2578480 - RNA, 19 nt, Artificial Sequence
  Description of Artificial Sequence: Synthetic oligonucleotide
  Sense strand starting at position 2889 of SEQ ID NO: 1889102
gcgggauucuuagaguccu

SEQ ID NO: 2578481 - RNA, 19 nt, Artificial Sequence
  Description of Artificial Sequence: Synthetic oligonucleotide
  Antisense strand to SEQ ID NO: 2578480
aggacucuaagaaucccgc

SEQ ID NO: 2578482 - RNA, 19 nt, Artificial Sequence
  Description of Artificial Sequence: Synthetic oligonucleotide
  Sense strand starting at position 2913 of SEQ ID NO: 1889102
ccuaaucccgcuuauagua

SEQ ID NO: 2578483 - RNA, 19 nt, Artificial Sequence
  Description of Artificial Sequence: Synthetic oligonucleotide
  Antisense strand to SEQ ID NO: 2578482
uacuauaagcgggauuagg

SEQ ID NO: 2578484 - RNA, 19 nt, Artificial Sequence
  Description of Artificial Sequence: Synthetic oligonucleotide
  Sense strand starting at position 2974 of SEQ ID NO: 1889102
gucugaaccugugauuucu

SEQ ID NO: 2578485 - RNA, 19 nt, Artificial Sequence
  Description of Artificial Sequence: Synthetic oligonucleotide
  Antisense strand to SEQ ID NO: 2578484
agaaaucacagguucagac

SEQ ID NO: 2578486 - RNA, 19 nt, Artificial Sequence
  Description of Artificial Sequence: Synthetic oligonucleotide
  Sense strand starting at position 2985 of SEQ ID NO: 1889102
ugauuucucuacuaaugag

SEQ ID NO: 2578487 - RNA, 19 nt, Artificial Sequence
  Description of Artificial Sequence: Synthetic oligonucleotide
  Antisense strand to SEQ ID NO: 2578486
cucauuaguagagaaauca

SEQ ID NO: 2578488 - RNA, 19 nt, Artificial Sequence
  Description of Artificial Sequence: Synthetic oligonucleotide
  Sense strand starting at position 3003 of SEQ ID NO: 1889102
gcaggauuaccaugggaac

SEQ ID NO: 2578489 - RNA, 19 nt, Artificial Sequence
  Description of Artificial Sequence: Synthetic oligonucleotide
  Antisense strand to SEQ ID NO: 2578488
guucccaugguaauccugc

SEQ ID NO: 2578490 - RNA, 19 nt, Artificial Sequence
  Description of Artificial Sequence: Synthetic oligonucleotide
  Sense strand starting at position 3139 of SEQ ID NO: 1889102
cugccuuguccuucgcaaa

SEQ ID NO: 2578491 - RNA, 19 nt, Artificial Sequence
  Description of Artificial Sequence: Synthetic oligonucleotide
  Antisense strand to SEQ ID NO: 2578490
uuugcgaaggacaaggcag

SEQ ID NO: 2578492 - RNA, 19 nt, Artificial Sequence
  Description of Artificial Sequence: Synthetic oligonucleotide
  Sense strand starting at position 3142 of SEQ ID NO: 1889102
ccuuguccuucgcaaagaa

SEQ ID NO: 2578493 - RNA, 19 nt, Artificial Sequence
  Description of Artificial Sequence: Synthetic oligonucleotide
  Antisense strand to SEQ ID NO: 2578492
uucuuugcgaaggacaagg

SEQ ID NO: 2578494 - RNA, 19 nt, Artificial Sequence
  Description of Artificial Sequence: Synthetic oligonucleotide
  Sense strand starting at position 3955 of SEQ ID NO: 1889102
uugaaauagugucuccauc

SEQ ID NO: 2578495 - RNA, 19 nt, Artificial Sequence
  Description of Artificial Sequence: Synthetic oligonucleotide
  Antisense strand to SEQ ID NO: 2578494
gauggagacacuauuucaa

SEQ ID NO: 2578496 - RNA, 19 nt, Artificial Sequence
  Description of Artificial Sequence: Synthetic oligonucleotide
  Sense strand starting at position 8 of SEQ ID NO: 1889103
uugaaucuguugucaccau

SEQ ID NO: 2578497 - RNA, 19 nt, Artificial Sequence
  Description of Artificial Sequence: Synthetic oligonucleotide
  Antisense strand to SEQ ID NO: 2578496
auggugacaacagauucaa

SEQ ID NO: 2578498 - RNA, 19 nt, Artificial Sequence
  Description of Artificial Sequence: Synthetic oligonucleotide
  Sense strand starting at position 28 of SEQ ID NO: 1889103
cucaauuggugccaaagaa

SEQ ID NO: 2578499 - RNA, 19 nt, Artificial Sequence
  Description of Artificial Sequence: Synthetic oligonucleotide
  Antisense strand to SEQ ID NO: 2578498
uucuuuggcaccaauugag

SEQ ID NO: 2578500 - RNA, 19 nt, Artificial Sequence
  Description of Artificial Sequence: Synthetic oligonucleotide
  Sense strand starting at position 193 of SEQ ID NO: 1889103
aguacucaucgugcguuau

SEQ ID NO: 2578501 - RNA, 19 nt, Artificial Sequence
  Description of Artificial Sequence: Synthetic oligonucleotide
  Antisense strand to SEQ ID NO: 2578500
auaacgcacgaugaguacu

SEQ ID NO: 2578502 - RNA, 19 nt, Artificial Sequence
  Description of Artificial Sequence: Synthetic oligonucleotide
  Sense strand starting at position 195 of SEQ ID NO: 1889103
uacucaucgugcguuauuu

SEQ ID NO: 2578503 - RNA, 19 nt, Artificial Sequence
  Description of Artificial Sequence: Synthetic oligonucleotide
  Antisense strand to SEQ ID NO: 2578502
aaauaacgcacgaugagua

SEQ ID NO: 2578504 - RNA, 19 nt, Artificial Sequence
  Description of Artificial Sequence: Synthetic oligonucleotide
  Sense strand starting at position 204 of SEQ ID NO: 1889103
ugcguuauuuggucuccca

SEQ ID NO: 2578505 - RNA, 19 nt, Artificial Sequence
  Description of Artificial Sequence: Synthetic oligonucleotide
  Antisense strand to SEQ ID NO: 2578504
ugggagaccaaauaacgca

SEQ ID NO: 2578506 - RNA, 19 nt, Artificial Sequence
  Description of Artificial Sequence: Synthetic oligonucleotide
  Sense strand starting at position 207 of SEQ ID NO: 1889103
guuauuuggucucccaugu

SEQ ID NO: 2578507 - RNA, 19 nt, Artificial Sequence
  Description of Artificial Sequence: Synthetic oligonucleotide
  Antisense strand to SEQ ID NO: 2578506
acaugggagaccaaauaac

SEQ ID NO: 2578508 - RNA, 19 nt, Artificial Sequence
  Description of Artificial Sequence: Synthetic oligonucleotide
  Sense strand starting at position 391 of SEQ ID NO: 1889103
ugaggagacuuccagaauc

SEQ ID NO: 2578509 - RNA, 19 nt, Artificial Sequence
  Description of Artificial Sequence: Synthetic oligonucleotide
  Antisense strand to SEQ ID NO: 2578508
gauucuggaagucuccuca

SEQ ID NO: 2578510 - RNA, 19 nt, Artificial Sequence
  Description of Artificial Sequence: Synthetic oligonucleotide
  Sense strand starting at position 677 of SEQ ID NO: 1889103
agagaagugcaucaagguu

SEQ ID NO: 2578511 - RNA, 19 nt, Artificial Sequence
  Description of Artificial Sequence: Synthetic oligonucleotide
  Antisense strand to SEQ ID NO: 2578510
aaccuugaugcacuucucu

SEQ ID NO: 2578512 - RNA, 19 nt, Artificial Sequence
  Description of Artificial Sequence: Synthetic oligonucleotide
  Sense strand starting at position 717 of SEQ ID NO: 1889103
uugggaguuugacauggaa

SEQ ID NO: 2578513 - RNA, 19 nt, Artificial Sequence
  Description of Artificial Sequence: Synthetic oligonucleotide
  Antisense strand to SEQ ID NO: 2578512
uuccaugucaaacucccaa

SEQ ID NO: 2578514 - RNA, 19 nt, Artificial Sequence
  Description of Artificial Sequence: Synthetic oligonucleotide
  Sense strand starting at position 868 of SEQ ID NO: 1889103
uaauguuagccgggcauga

SEQ ID NO: 2578515 - RNA, 19 nt, Artificial Sequence
  Description of Artificial Sequence: Synthetic oligonucleotide
  Antisense strand to SEQ ID NO: 2578514
ucaugcccggcuaacauua

SEQ ID NO: 2578516 - RNA, 19 nt, Artificial Sequence
  Description of Artificial Sequence: Synthetic oligonucleotide
  Sense strand starting at position 1085 of SEQ ID NO: 1889103
ggguaucagugacagacuu

SEQ ID NO: 2578517 - RNA, 19 nt, Artificial Sequence
  Description of Artificial Sequence: Synthetic oligonucleotide
  Antisense strand to SEQ ID NO: 2578516
aagucugucacugauaccc

SEQ ID NO: 2578518 - RNA, 19 nt, Artificial Sequence
  Description of Artificial Sequence: Synthetic oligonucleotide
  Sense strand starting at position 1095 of SEQ ID NO: 1889103
gacagacuuuaguaagcau

SEQ ID NO: 2578519 - RNA, 19 nt, Artificial Sequence
  Description of Artificial Sequence: Synthetic oligonucleotide
  Antisense strand to SEQ ID NO: 2578518
augcuuacuaaagucuguc

SEQ ID NO: 2578520 - RNA, 19 nt, Artificial Sequence
  Description of Artificial Sequence: Synthetic oligonucleotide
  Sense strand starting at position 1104 of SEQ ID NO: 1889103
uaguaagcaugguuguuau

SEQ ID NO: 2578521 - RNA, 19 nt, Artificial Sequence
  Description of Artificial Sequence: Synthetic oligonucleotide
  Antisense strand to SEQ ID NO: 2578520
auaacaaccaugcuuacua

SEQ ID NO: 2578522 - RNA, 19 nt, Artificial Sequence
  Description of Artificial Sequence: Synthetic oligonucleotide
  Sense strand starting at position 1111 of SEQ ID NO: 1889103
caugguuguuaugccauau

SEQ ID NO: 2578523 - RNA, 19 nt, Artificial Sequence
  Description of Artificial Sequence: Synthetic oligonucleotide
  Antisense strand to SEQ ID NO: 2578522
auauggcauaacaaccaug

SEQ ID NO: 2578524 - RNA, 19 nt, Artificial Sequence
  Description of Artificial Sequence: Synthetic oligonucleotide
  Sense strand starting at position 1145 of SEQ ID NO: 1889103
ugaacuugaacccgggaau

SEQ ID NO: 2578525 - RNA, 19 nt, Artificial Sequence
  Description of Artificial Sequence: Synthetic oligonucleotide
  Antisense strand to SEQ ID NO: 2578524
auucccggguucaaguuca

SEQ ID NO: 2578526 - RNA, 19 nt, Artificial Sequence
  Description of Artificial Sequence: Synthetic oligonucleotide
  Sense strand starting at position 1146 of SEQ ID NO: 1889103
gaacuugaacccgggaauu

SEQ ID NO: 2578527 - RNA, 19 nt, Artificial Sequence
  Description of Artificial Sequence: Synthetic oligonucleotide
  Antisense strand to SEQ ID NO: 2578526
aauucccggguucaaguuc

SEQ ID NO: 2578528 - RNA, 19 nt, Artificial Sequence
  Description of Artificial Sequence: Synthetic oligonucleotide
  Sense strand starting at position 1197 of SEQ ID NO: 1889103
uacugcagucugggugaua

SEQ ID NO: 2578529 - RNA, 19 nt, Artificial Sequence
  Description of Artificial Sequence: Synthetic oligonucleotide
  Antisense strand to SEQ ID NO: 2578528
uaucacccagacugcagua

SEQ ID NO: 2578530 - RNA, 19 nt, Artificial Sequence
  Description of Artificial Sequence: Synthetic oligonucleotide
  Sense strand starting at position 1198 of SEQ ID NO: 1889103
acugcagucugggugauaa

SEQ ID NO: 2578531 - RNA, 19 nt, Artificial Sequence
  Description of Artificial Sequence: Synthetic oligonucleotide
  Antisense strand to SEQ ID NO: 2578530
uuaucacccagacugcagu

SEQ ID NO: 2578532 - RNA, 19 nt, Artificial Sequence
  Description of Artificial Sequence: Synthetic oligonucleotide
  Sense strand starting at position 1200 of SEQ ID NO: 1889103
ugcagucugggugauaaag

SEQ ID NO: 2578533 - RNA, 19 nt, Artificial Sequence
  Description of Artificial Sequence: Synthetic oligonucleotide
  Antisense strand to SEQ ID NO: 2578532
cuuuaucacccagacugca

SEQ ID NO: 2578534 - RNA, 19 nt, Artificial Sequence
  Description of Artificial Sequence: Synthetic oligonucleotide
  Sense strand starting at position 1310 of SEQ ID NO: 1889103
uaaacaaacuagugagagu

SEQ ID NO: 2578535 - RNA, 19 nt, Artificial Sequence
  Description of Artificial Sequence: Synthetic oligonucleotide
  Antisense strand to SEQ ID NO: 2578534
acucucacuaguuuguuua

SEQ ID NO: 2578536 - RNA, 19 nt, Artificial Sequence
  Description of Artificial Sequence: Synthetic oligonucleotide
  Sense strand starting at position 1567 of SEQ ID NO: 1889103
gaagguugaggcugugaug

SEQ ID NO: 2578537 - RNA, 19 nt, Artificial Sequence
  Description of Artificial Sequence: Synthetic oligonucleotide
  Antisense strand to SEQ ID NO: 2578536
caucacagccucaaccuuc

SEQ ID NO: 2578538 - RNA, 19 nt, Artificial Sequence
  Description of Artificial Sequence: Synthetic oligonucleotide
  Sense strand starting at position 1578 of SEQ ID NO: 1889103
cugugaugagccgagaaug

SEQ ID NO: 2578539 - RNA, 19 nt, Artificial Sequence
  Description of Artificial Sequence: Synthetic oligonucleotide
  Antisense strand to SEQ ID NO: 2578538
cauucucggcucaucacag

SEQ ID NO: 2578540 - RNA, 19 nt, Artificial Sequence
  Description of Artificial Sequence: Synthetic oligonucleotide
  Sense strand starting at position 1767 of SEQ ID NO: 1889103
gaagaaaugacguggugaa

SEQ ID NO: 2578541 - RNA, 19 nt, Artificial Sequence
  Description of Artificial Sequence: Synthetic oligonucleotide
  Antisense strand to SEQ ID NO: 2578540
uucaccacgucauuucuuc

SEQ ID NO: 2578542 - RNA, 19 nt, Artificial Sequence
  Description of Artificial Sequence: Synthetic oligonucleotide
  Sense strand starting at position 1768 of SEQ ID NO: 1889103
aagaaaugacguggugaaa

SEQ ID NO: 2578543 - RNA, 19 nt, Artificial Sequence
  Description of Artificial Sequence: Synthetic oligonucleotide
  Antisense strand to SEQ ID NO: 2578542
uuucaccacgucauuucuu

SEQ ID NO: 2578544 - RNA, 19 nt, Artificial Sequence
  Description of Artificial Sequence: Synthetic oligonucleotide
  Sense strand starting at position 2044 of SEQ ID NO: 1889103
ggcagugacugguucauau

SEQ ID NO: 2578545 - RNA, 19 nt, Artificial Sequence
  Description of Artificial Sequence: Synthetic oligonucleotide
  Antisense strand to SEQ ID NO: 2578544
auaugaaccagucacugcc

SEQ ID NO: 2578546 - RNA, 19 nt, Artificial Sequence
  Description of Artificial Sequence: Synthetic oligonucleotide
  Sense strand starting at position 2180 of SEQ ID NO: 1889103
gagucauucucaccaggcu

SEQ ID NO: 2578547 - RNA, 19 nt, Artificial Sequence
  Description of Artificial Sequence: Synthetic oligonucleotide
  Antisense strand to SEQ ID NO: 2578546
agccuggugagaaugacuc

SEQ ID NO: 2578548 - RNA, 19 nt, Artificial Sequence
  Description of Artificial Sequence: Synthetic oligonucleotide
  Sense strand starting at position 2442 of SEQ ID NO: 1889103
gggaagagguucucgggaa

SEQ ID NO: 2578549 - RNA, 19 nt, Artificial Sequence
  Description of Artificial Sequence: Synthetic oligonucleotide
  Antisense strand to SEQ ID NO: 2578548
uucccgagaaccucuuccc

SEQ ID NO: 2578550 - RNA, 19 nt, Artificial Sequence
  Description of Artificial Sequence: Synthetic oligonucleotide
  Sense strand starting at position 2443 of SEQ ID NO: 1889103
ggaagagguucucgggaac

SEQ ID NO: 2578551 - RNA, 19 nt, Artificial Sequence
  Description of Artificial Sequence: Synthetic oligonucleotide
  Antisense strand to SEQ ID NO: 2578550
guucccgagaaccucuucc

SEQ ID NO: 2578552 - RNA, 19 nt, Artificial Sequence
  Description of Artificial Sequence: Synthetic oligonucleotide
  Sense strand starting at position 2478 of SEQ ID NO: 1889103
gguauaugucaagggcuga

SEQ ID NO: 2578553 - RNA, 19 nt, Artificial Sequence
  Description of Artificial Sequence: Synthetic oligonucleotide
  Antisense strand to SEQ ID NO: 2578552
ucagcccuugacauauacc

SEQ ID NO: 2578554 - RNA, 19 nt, Artificial Sequence
  Description of Artificial Sequence: Synthetic oligonucleotide
  Sense strand starting at position 2482 of SEQ ID NO: 1889103
uaugucaagggcugaauua

SEQ ID NO: 2578555 - RNA, 19 nt, Artificial Sequence
  Description of Artificial Sequence: Synthetic oligonucleotide
  Antisense strand to SEQ ID NO: 2578554
uaauucagcccuugacaua

SEQ ID NO: 2578556 - RNA, 19 nt, Artificial Sequence
  Description of Artificial Sequence: Synthetic oligonucleotide
  Sense strand starting at position 2603 of SEQ ID NO: 1889103
gcugcucugcuccauggaa

SEQ ID NO: 2578557 - RNA, 19 nt, Artificial Sequence
  Description of Artificial Sequence: Synthetic oligonucleotide
  Antisense strand to SEQ ID NO: 2578556
uuccauggagcagagcagc

SEQ ID NO: 2578558 - RNA, 19 nt, Artificial Sequence
  Description of Artificial Sequence: Synthetic oligonucleotide
  Sense strand starting at position 2641 of SEQ ID NO: 1889103
gacgucugcgaauaguuua

SEQ ID NO: 2578559 - RNA, 19 nt, Artificial Sequence
  Description of Artificial Sequence: Synthetic oligonucleotide
  Antisense strand to SEQ ID NO: 2578558
uaaacuauucgcagacguc

SEQ ID NO: 2578560 - RNA, 19 nt, Artificial Sequence
  Description of Artificial Sequence: Synthetic oligonucleotide
  Sense strand starting at position 2672 of SEQ ID NO: 1889103
ccacaaacacguuauguga

SEQ ID NO: 2578561 - RNA, 19 nt, Artificial Sequence
  Description of Artificial Sequence: Synthetic oligonucleotide
  Antisense strand to SEQ ID NO: 2578560
ucacauaacguguuugugg

SEQ ID NO: 2578562 - RNA, 19 nt, Artificial Sequence
  Description of Artificial Sequence: Synthetic oligonucleotide
  Sense strand starting at position 2913 of SEQ ID NO: 1889103
ccuaaucccgcuuauagua

SEQ ID NO: 2578563 - RNA, 19 nt, Artificial Sequence
  Description of Artificial Sequence: Synthetic oligonucleotide
  Antisense strand to SEQ ID NO: 2578562
uacuauaagcgggauuagg

SEQ ID NO: 2578564 - RNA, 19 nt, Artificial Sequence
  Description of Artificial Sequence: Synthetic oligonucleotide
  Sense strand starting at position 2974 of SEQ ID NO: 1889103
gucugaaccugugauuucu

SEQ ID NO: 2578565 - RNA, 19 nt, Artificial Sequence
  Description of Artificial Sequence: Synthetic oligonucleotide
  Antisense strand to SEQ ID NO: 2578564
agaaaucacagguucagac

SEQ ID NO: 2578566 - RNA, 19 nt, Artificial Sequence
  Description of Artificial Sequence: Synthetic oligonucleotide
  Sense strand starting at position 2985 of SEQ ID NO: 1889103
ugauuucucuacuaaugag

SEQ ID NO: 2578567 - RNA, 19 nt, Artificial Sequence
  Description of Artificial Sequence: Synthetic oligonucleotide
  Antisense strand to SEQ ID NO: 2578566
cucauuaguagagaaauca

SEQ ID NO: 2578568 - RNA, 19 nt, Artificial Sequence
  Description of Artificial Sequence: Synthetic oligonucleotide
  Sense strand starting at position 3139 of SEQ ID NO: 1889103
cugccuuguccuucgcaaa

SEQ ID NO: 2578569 - RNA, 19 nt, Artificial Sequence
  Description of Artificial Sequence: Synthetic oligonucleotide
  Antisense strand to SEQ ID NO: 2578568
uuugcgaaggacaaggcag

SEQ ID NO: 2578570 - RNA, 19 nt, Artificial Sequence
  Description of Artificial Sequence: Synthetic oligonucleotide
  Sense strand starting at position 3503 of SEQ ID NO: 1889103
aagcaaucugccugcguua

SEQ ID NO: 2578571 - RNA, 19 nt, Artificial Sequence
  Description of Artificial Sequence: Synthetic oligonucleotide
  Antisense strand to SEQ ID NO: 2578570
uaacgcaggcagauugcuu

SEQ ID NO: 2578572 - RNA, 19 nt, Artificial Sequence
  Description of Artificial Sequence: Synthetic oligonucleotide
  Sense strand starting at position 3697 of SEQ ID NO: 1889103
cugaucucagcuuacugaa

SEQ ID NO: 2578573 - RNA, 19 nt, Artificial Sequence
  Description of Artificial Sequence: Synthetic oligonucleotide
  Antisense strand to SEQ ID NO: 2578572
uucaguaagcugagaucag

SEQ ID NO: 2578574 - RNA, 19 nt, Artificial Sequence
  Description of Artificial Sequence: Synthetic oligonucleotide
  Sense strand starting at position 3955 of SEQ ID NO: 1889103
uugaaauagugucuccauc

SEQ ID NO: 2578575 - RNA, 19 nt, Artificial Sequence
  Description of Artificial Sequence: Synthetic oligonucleotide
  Antisense strand to SEQ ID NO: 2578574
gauggagacacuauuucaa

SEQ ID NO: 2578576 - RNA, 19 nt, Artificial Sequence
  Description of Artificial Sequence: Synthetic oligonucleotide
  Sense strand starting at position 53 of SEQ ID NO: 1889104
cucaauuggugccaaagaa

SEQ ID NO: 2578577 - RNA, 19 nt, Artificial Sequence
  Description of Artificial Sequence: Synthetic oligonucleotide
  Antisense strand to SEQ ID NO: 2578576
uucuuuggcaccaauugag

SEQ ID NO: 2578578 - RNA, 19 nt, Artificial Sequence
  Description of Artificial Sequence: Synthetic oligonucleotide
  Sense strand starting at position 218 of SEQ ID NO: 1889104
aguacucaucgugcguuau

SEQ ID NO: 2578579 - RNA, 19 nt, Artificial Sequence
  Description of Artificial Sequence: Synthetic oligonucleotide
  Antisense strand to SEQ ID NO: 2578578
auaacgcacgaugaguacu

SEQ ID NO: 2578580 - RNA, 19 nt, Artificial Sequence
  Description of Artificial Sequence: Synthetic oligonucleotide
  Sense strand starting at position 219 of SEQ ID NO: 1889104
guacucaucgugcguuauu

SEQ ID NO: 2578581 - RNA, 19 nt, Artificial Sequence
  Description of Artificial Sequence: Synthetic oligonucleotide
  Antisense strand to SEQ ID NO: 2578580
aauaacgcacgaugaguac

SEQ ID NO: 2578582 - RNA, 19 nt, Artificial Sequence
  Description of Artificial Sequence: Synthetic oligonucleotide
  Sense strand starting at position 220 of SEQ ID NO: 1889104
uacucaucgugcguuauuu

SEQ ID NO: 2578583 - RNA, 19 nt, Artificial Sequence
  Description of Artificial Sequence: Synthetic oligonucleotide
  Antisense strand to SEQ ID NO: 2578582
aaauaacgcacgaugagua

SEQ ID NO: 2578584 - RNA, 19 nt, Artificial Sequence
  Description of Artificial Sequence: Synthetic oligonucleotide
  Sense strand starting at position 229 of SEQ ID NO: 1889104
ugcguuauuuggucuccca

SEQ ID NO: 2578585 - RNA, 19 nt, Artificial Sequence
  Description of Artificial Sequence: Synthetic oligonucleotide
  Antisense strand to SEQ ID NO: 2578584
ugggagaccaaauaacgca

SEQ ID NO: 2578586 - RNA, 19 nt, Artificial Sequence
  Description of Artificial Sequence: Synthetic oligonucleotide
  Sense strand starting at position 232 of SEQ ID NO: 1889104
guuauuuggucucccaugu

SEQ ID NO: 2578587 - RNA, 19 nt, Artificial Sequence
  Description of Artificial Sequence: Synthetic oligonucleotide
  Antisense strand to SEQ ID NO: 2578586
acaugggagaccaaauaac

SEQ ID NO: 2578588 - RNA, 19 nt, Artificial Sequence
  Description of Artificial Sequence: Synthetic oligonucleotide
  Sense strand starting at position 243 of SEQ ID NO: 1889104
ucccaugucucuugugaaa

SEQ ID NO: 2578589 - RNA, 19 nt, Artificial Sequence
  Description of Artificial Sequence: Synthetic oligonucleotide
  Antisense strand to SEQ ID NO: 2578588
uuucacaagagacauggga

SEQ ID NO: 2578590 - RNA, 19 nt, Artificial Sequence
  Description of Artificial Sequence: Synthetic oligonucleotide
  Sense strand starting at position 374 of SEQ ID NO: 1889104
gcgaaagucucagaggcuu

SEQ ID NO: 2578591 - RNA, 19 nt, Artificial Sequence
  Description of Artificial Sequence: Synthetic oligonucleotide
  Antisense strand to SEQ ID NO: 2578590
aagccucugagacuuucgc

SEQ ID NO: 2578592 - RNA, 19 nt, Artificial Sequence
  Description of Artificial Sequence: Synthetic oligonucleotide
  Sense strand starting at position 416 of SEQ ID NO: 1889104
ugaggagacuuccagaauc

SEQ ID NO: 2578593 - RNA, 19 nt, Artificial Sequence
  Description of Artificial Sequence: Synthetic oligonucleotide
  Antisense strand to SEQ ID NO: 2578592
gauucuggaagucuccuca

SEQ ID NO: 2578594 - RNA, 19 nt, Artificial Sequence
  Description of Artificial Sequence: Synthetic oligonucleotide
  Sense strand starting at position 702 of SEQ ID NO: 1889104
agagaagugcaucaagguu

SEQ ID NO: 2578595 - RNA, 19 nt, Artificial Sequence
  Description of Artificial Sequence: Synthetic oligonucleotide
  Antisense strand to SEQ ID NO: 2578594
aaccuugaugcacuucucu

SEQ ID NO: 2578596 - RNA, 19 nt, Artificial Sequence
  Description of Artificial Sequence: Synthetic oligonucleotide
  Sense strand starting at position 742 of SEQ ID NO: 1889104
uugggaguuugacauggaa

SEQ ID NO: 2578597 - RNA, 19 nt, Artificial Sequence
  Description of Artificial Sequence: Synthetic oligonucleotide
  Antisense strand to SEQ ID NO: 2578596
uuccaugucaaacucccaa

SEQ ID NO: 2578598 - RNA, 19 nt, Artificial Sequence
  Description of Artificial Sequence: Synthetic oligonucleotide
  Sense strand starting at position 888 of SEQ ID NO: 1889104
uaauguuagccgggcauga

SEQ ID NO: 2578599 - RNA, 19 nt, Artificial Sequence
  Description of Artificial Sequence: Synthetic oligonucleotide
  Antisense strand to SEQ ID NO: 2578598
ucaugcccggcuaacauua

SEQ ID NO: 2578600 - RNA, 19 nt, Artificial Sequence
  Description of Artificial Sequence: Synthetic oligonucleotide
  Sense strand starting at position 986 of SEQ ID NO: 1889104
gggccuuggucagguaaug

SEQ ID NO: 2578601 - RNA, 19 nt, Artificial Sequence
  Description of Artificial Sequence: Synthetic oligonucleotide
  Antisense strand to SEQ ID NO: 2578600
cauuaccugaccaaggccc

SEQ ID NO: 2578602 - RNA, 19 nt, Artificial Sequence
  Description of Artificial Sequence: Synthetic oligonucleotide
  Sense strand starting at position 1105 of SEQ ID NO: 1889104
ggguaucagugacagacuu

SEQ ID NO: 2578603 - RNA, 19 nt, Artificial Sequence
  Description of Artificial Sequence: Synthetic oligonucleotide
  Antisense strand to SEQ ID NO: 2578602
aagucugucacugauaccc

SEQ ID NO: 2578604 - RNA, 19 nt, Artificial Sequence
  Description of Artificial Sequence: Synthetic oligonucleotide
  Sense strand starting at position 1115 of SEQ ID NO: 1889104
gacagacuuuaguaagcau

SEQ ID NO: 2578605 - RNA, 19 nt, Artificial Sequence
  Description of Artificial Sequence: Synthetic oligonucleotide
  Antisense strand to SEQ ID NO: 2578604
augcuuacuaaagucuguc

SEQ ID NO: 2578606 - RNA, 19 nt, Artificial Sequence
  Description of Artificial Sequence: Synthetic oligonucleotide
  Sense strand starting at position 1124 of SEQ ID NO: 1889104
uaguaagcaugguuguuau

SEQ ID NO: 2578607 - RNA, 19 nt, Artificial Sequence
  Description of Artificial Sequence: Synthetic oligonucleotide
  Antisense strand to SEQ ID NO: 2578606
auaacaaccaugcuuacua

SEQ ID NO: 2578608 - RNA, 19 nt, Artificial Sequence
  Description of Artificial Sequence: Synthetic oligonucleotide
  Sense strand starting at position 1131 of SEQ ID NO: 1889104
caugguuguuaugccauau

SEQ ID NO: 2578609 - RNA, 19 nt, Artificial Sequence
  Description of Artificial Sequence: Synthetic oligonucleotide
  Antisense strand to SEQ ID NO: 2578608
auauggcauaacaaccaug

SEQ ID NO: 2578610 - RNA, 19 nt, Artificial Sequence
  Description of Artificial Sequence: Synthetic oligonucleotide
  Sense strand starting at position 1165 of SEQ ID NO: 1889104
ugaacuugaacccgggaau

SEQ ID NO: 2578611 - RNA, 19 nt, Artificial Sequence
  Description of Artificial Sequence: Synthetic oligonucleotide
  Antisense strand to SEQ ID NO: 2578610
auucccggguucaaguuca

SEQ ID NO: 2578612 - RNA, 19 nt, Artificial Sequence
  Description of Artificial Sequence: Synthetic oligonucleotide
  Sense strand starting at position 1217 of SEQ ID NO: 1889104
uacugcagucugggugaua

SEQ ID NO: 2578613 - RNA, 19 nt, Artificial Sequence
  Description of Artificial Sequence: Synthetic oligonucleotide
  Antisense strand to SEQ ID NO: 2578612
uaucacccagacugcagua

SEQ ID NO: 2578614 - RNA, 19 nt, Artificial Sequence
  Description of Artificial Sequence: Synthetic oligonucleotide
  Sense strand starting at position 1330 of SEQ ID NO: 1889104
uaaacaaacuagugagagu

SEQ ID NO: 2578615 - RNA, 19 nt, Artificial Sequence
  Description of Artificial Sequence: Synthetic oligonucleotide
  Antisense strand to SEQ ID NO: 2578614
acucucacuaguuuguuua

SEQ ID NO: 2578616 - RNA, 19 nt, Artificial Sequence
  Description of Artificial Sequence: Synthetic oligonucleotide
  Sense strand starting at position 1598 of SEQ ID NO: 1889104
cugugaugagccgagaaug

SEQ ID NO: 2578617 - RNA, 19 nt, Artificial Sequence
  Description of Artificial Sequence: Synthetic oligonucleotide
  Antisense strand to SEQ ID NO: 2578616
cauucucggcucaucacag

SEQ ID NO: 2578618 - RNA, 19 nt, Artificial Sequence
  Description of Artificial Sequence: Synthetic oligonucleotide
  Sense strand starting at position 1787 of SEQ ID NO: 1889104
gaagaaaugacguggugaa

SEQ ID NO: 2578619 - RNA, 19 nt, Artificial Sequence
  Description of Artificial Sequence: Synthetic oligonucleotide
  Antisense strand to SEQ ID NO: 2578618
uucaccacgucauuucuuc

SEQ ID NO: 2578620 - RNA, 19 nt, Artificial Sequence
  Description of Artificial Sequence: Synthetic oligonucleotide
  Sense strand starting at position 1788 of SEQ ID NO: 1889104
aagaaaugacguggugaaa

SEQ ID NO: 2578621 - RNA, 19 nt, Artificial Sequence
  Description of Artificial Sequence: Synthetic oligonucleotide
  Antisense strand to SEQ ID NO: 2578620
uuucaccacgucauuucuu

SEQ ID NO: 2578622 - RNA, 19 nt, Artificial Sequence
  Description of Artificial Sequence: Synthetic oligonucleotide
  Sense strand starting at position 1946 of SEQ ID NO: 1889104
ggaacuuuaucacaccaag

SEQ ID NO: 2578623 - RNA, 19 nt, Artificial Sequence
  Description of Artificial Sequence: Synthetic oligonucleotide
  Antisense strand to SEQ ID NO: 2578622
cuuggugugauaaaguucc

SEQ ID NO: 2578624 - RNA, 19 nt, Artificial Sequence
  Description of Artificial Sequence: Synthetic oligonucleotide
  Sense strand starting at position 2064 of SEQ ID NO: 1889104
ggcagugacugguucauau

SEQ ID NO: 2578625 - RNA, 19 nt, Artificial Sequence
  Description of Artificial Sequence: Synthetic oligonucleotide
  Antisense strand to SEQ ID NO: 2578624
auaugaaccagucacugcc

SEQ ID NO: 2578626 - RNA, 19 nt, Artificial Sequence
  Description of Artificial Sequence: Synthetic oligonucleotide
  Sense strand starting at position 2464 of SEQ ID NO: 1889104
ggaagagguucucgggaac

SEQ ID NO: 2578627 - RNA, 19 nt, Artificial Sequence
  Description of Artificial Sequence: Synthetic oligonucleotide
  Antisense strand to SEQ ID NO: 2578626
guucccgagaaccucuucc

SEQ ID NO: 2578628 - RNA, 19 nt, Artificial Sequence
  Description of Artificial Sequence: Synthetic oligonucleotide
  Sense strand starting at position 2499 of SEQ ID NO: 1889104
gguauaugucaagggcuga

SEQ ID NO: 2578629 - RNA, 19 nt, Artificial Sequence
  Description of Artificial Sequence: Synthetic oligonucleotide
  Antisense strand to SEQ ID NO: 2578628
ucagcccuugacauauacc

SEQ ID NO: 2578630 - RNA, 19 nt, Artificial Sequence
  Description of Artificial Sequence: Synthetic oligonucleotide
  Sense strand starting at position 2500 of SEQ ID NO: 1889104
guauaugucaagggcugaa

SEQ ID NO: 2578631 - RNA, 19 nt, Artificial Sequence
  Description of Artificial Sequence: Synthetic oligonucleotide
  Antisense strand to SEQ ID NO: 2578630
uucagcccuugacauauac

SEQ ID NO: 2578632 - RNA, 19 nt, Artificial Sequence
  Description of Artificial Sequence: Synthetic oligonucleotide
  Sense strand starting at position 2503 of SEQ ID NO: 1889104
uaugucaagggcugaauua

SEQ ID NO: 2578633 - RNA, 19 nt, Artificial Sequence
  Description of Artificial Sequence: Synthetic oligonucleotide
  Antisense strand to SEQ ID NO: 2578632
uaauucagcccuugacaua

SEQ ID NO: 2578634 - RNA, 19 nt, Artificial Sequence
  Description of Artificial Sequence: Synthetic oligonucleotide
  Sense strand starting at position 2624 of SEQ ID NO: 1889104
gcugcucugcuccauggaa

SEQ ID NO: 2578635 - RNA, 19 nt, Artificial Sequence
  Description of Artificial Sequence: Synthetic oligonucleotide
  Antisense strand to SEQ ID NO: 2578634
uuccauggagcagagcagc

SEQ ID NO: 2578636 - RNA, 19 nt, Artificial Sequence
  Description of Artificial Sequence: Synthetic oligonucleotide
  Sense strand starting at position 2662 of SEQ ID NO: 1889104
gacgucugcgaauaguuua

SEQ ID NO: 2578637 - RNA, 19 nt, Artificial Sequence
  Description of Artificial Sequence: Synthetic oligonucleotide
  Antisense strand to SEQ ID NO: 2578636
uaaacuauucgcagacguc

SEQ ID NO: 2578638 - RNA, 19 nt, Artificial Sequence
  Description of Artificial Sequence: Synthetic oligonucleotide
  Sense strand starting at position 2693 of SEQ ID NO: 1889104
ccacaaacacguuauguga

SEQ ID NO: 2578639 - RNA, 19 nt, Artificial Sequence
  Description of Artificial Sequence: Synthetic oligonucleotide
  Antisense strand to SEQ ID NO: 2578638
ucacauaacguguuugugg

SEQ ID NO: 2578640 - RNA, 19 nt, Artificial Sequence
  Description of Artificial Sequence: Synthetic oligonucleotide
  Sense strand starting at position 2910 of SEQ ID NO: 1889104
gcgggauucuuagaguccu

SEQ ID NO: 2578641 - RNA, 19 nt, Artificial Sequence
  Description of Artificial Sequence: Synthetic oligonucleotide
  Antisense strand to SEQ ID NO: 2578640
aggacucuaagaaucccgc

SEQ ID NO: 2578642 - RNA, 19 nt, Artificial Sequence
  Description of Artificial Sequence: Synthetic oligonucleotide
  Sense strand starting at position 2934 of SEQ ID NO: 1889104
ccuaaucccgcuuauagua

SEQ ID NO: 2578643 - RNA, 19 nt, Artificial Sequence
  Description of Artificial Sequence: Synthetic oligonucleotide
  Antisense strand to SEQ ID NO: 2578642
uacuauaagcgggauuagg

SEQ ID NO: 2578644 - RNA, 19 nt, Artificial Sequence
  Description of Artificial Sequence: Synthetic oligonucleotide
  Sense strand starting at position 2995 of SEQ ID NO: 1889104
gucugaaccugugauuucu

SEQ ID NO: 2578645 - RNA, 19 nt, Artificial Sequence
  Description of Artificial Sequence: Synthetic oligonucleotide
  Antisense strand to SEQ ID NO: 2578644
agaaaucacagguucagac

SEQ ID NO: 2578646 - RNA, 19 nt, Artificial Sequence
  Description of Artificial Sequence: Synthetic oligonucleotide
  Sense strand starting at position 3006 of SEQ ID NO: 1889104
ugauuucucuacuaaugag

SEQ ID NO: 2578647 - RNA, 19 nt, Artificial Sequence
  Description of Artificial Sequence: Synthetic oligonucleotide
  Antisense strand to SEQ ID NO: 2578646
cucauuaguagagaaauca

SEQ ID NO: 2578648 - RNA, 19 nt, Artificial Sequence
  Description of Artificial Sequence: Synthetic oligonucleotide
  Sense strand starting at position 3024 of SEQ ID NO: 1889104
gcaggauuaccaugggaac

SEQ ID NO: 2578649 - RNA, 19 nt, Artificial Sequence
  Description of Artificial Sequence: Synthetic oligonucleotide
  Antisense strand to SEQ ID NO: 2578648
guucccaugguaauccugc

SEQ ID NO: 2578650 - RNA, 19 nt, Artificial Sequence
  Description of Artificial Sequence: Synthetic oligonucleotide
  Sense strand starting at position 3160 of SEQ ID NO: 1889104
cugccuuguccuucgcaaa

SEQ ID NO: 2578651 - RNA, 19 nt, Artificial Sequence
  Description of Artificial Sequence: Synthetic oligonucleotide
  Antisense strand to SEQ ID NO: 2578650
uuugcgaaggacaaggcag

SEQ ID NO: 2578652 - RNA, 19 nt, Artificial Sequence
  Description of Artificial Sequence: Synthetic oligonucleotide
  Sense strand starting at position 3163 of SEQ ID NO: 1889104
ccuuguccuucgcaaagaa

SEQ ID NO: 2578653 - RNA, 19 nt, Artificial Sequence
  Description of Artificial Sequence: Synthetic oligonucleotide
  Antisense strand to SEQ ID NO: 2578652
uucuuugcgaaggacaagg

SEQ ID NO: 2578654 - RNA, 19 nt, Artificial Sequence
  Description of Artificial Sequence: Synthetic oligonucleotide
  Sense strand starting at position 3976 of SEQ ID NO: 1889104
uugaaauagugucuccauc

SEQ ID NO: 2578655 - RNA, 19 nt, Artificial Sequence
  Description of Artificial Sequence: Synthetic oligonucleotide
  Antisense strand to SEQ ID NO: 2578654
gauggagacacuauuucaa

SEQ ID NO: 2578656 - RNA, 19 nt, Artificial Sequence
  Description of Artificial Sequence: Synthetic oligonucleotide
  Sense strand starting at position 29 of SEQ ID NO: 1889105
uugaaucuguugucaccau

SEQ ID NO: 2578657 - RNA, 19 nt, Artificial Sequence
  Description of Artificial Sequence: Synthetic oligonucleotide
  Antisense strand to SEQ ID NO: 2578656
auggugacaacagauucaa

SEQ ID NO: 2578658 - RNA, 19 nt, Artificial Sequence
  Description of Artificial Sequence: Synthetic oligonucleotide
  Sense strand starting at position 49 of SEQ ID NO: 1889105
cucaauuggugccaaagaa

SEQ ID NO: 2578659 - RNA, 19 nt, Artificial Sequence
  Description of Artificial Sequence: Synthetic oligonucleotide
  Antisense strand to SEQ ID NO: 2578658
uucuuuggcaccaauugag

SEQ ID NO: 2578660 - RNA, 19 nt, Artificial Sequence
  Description of Artificial Sequence: Synthetic oligonucleotide
  Sense strand starting at position 214 of SEQ ID NO: 1889105
aguacucaucgugcguuau

SEQ ID NO: 2578661 - RNA, 19 nt, Artificial Sequence
  Description of Artificial Sequence: Synthetic oligonucleotide
  Antisense strand to SEQ ID NO: 2578660
auaacgcacgaugaguacu

SEQ ID NO: 2578662 - RNA, 19 nt, Artificial Sequence
  Description of Artificial Sequence: Synthetic oligonucleotide
  Sense strand starting at position 216 of SEQ ID NO: 1889105
uacucaucgugcguuauuu

SEQ ID NO: 2578663 - RNA, 19 nt, Artificial Sequence
  Description of Artificial Sequence: Synthetic oligonucleotide
  Antisense strand to SEQ ID NO: 2578662
aaauaacgcacgaugagua

SEQ ID NO: 2578664 - RNA, 19 nt, Artificial Sequence
  Description of Artificial Sequence: Synthetic oligonucleotide
  Sense strand starting at position 225 of SEQ ID NO: 1889105
ugcguuauuuggucuccca

SEQ ID NO: 2578665 - RNA, 19 nt, Artificial Sequence
  Description of Artificial Sequence: Synthetic oligonucleotide
  Antisense strand to SEQ ID NO: 2578664
ugggagaccaaauaacgca

SEQ ID NO: 2578666 - RNA, 19 nt, Artificial Sequence
  Description of Artificial Sequence: Synthetic oligonucleotide
  Sense strand starting at position 228 of SEQ ID NO: 1889105
guuauuuggucucccaugu

SEQ ID NO: 2578667 - RNA, 19 nt, Artificial Sequence
  Description of Artificial Sequence: Synthetic oligonucleotide
  Antisense strand to SEQ ID NO: 2578666
acaugggagaccaaauaac

SEQ ID NO: 2578668 - RNA, 19 nt, Artificial Sequence
  Description of Artificial Sequence: Synthetic oligonucleotide
  Sense strand starting at position 412 of SEQ ID NO: 1889105
ugaggagacuuccagaauc

SEQ ID NO: 2578669 - RNA, 19 nt, Artificial Sequence
  Description of Artificial Sequence: Synthetic oligonucleotide
  Antisense strand to SEQ ID NO: 2578668
gauucuggaagucuccuca

SEQ ID NO: 2578670 - RNA, 19 nt, Artificial Sequence
  Description of Artificial Sequence: Synthetic oligonucleotide
  Sense strand starting at position 698 of SEQ ID NO: 1889105
agagaagugcaucaagguu

SEQ ID NO: 2578671 - RNA, 19 nt, Artificial Sequence
  Description of Artificial Sequence: Synthetic oligonucleotide
  Antisense strand to SEQ ID NO: 2578670
aaccuugaugcacuucucu

SEQ ID NO: 2578672 - RNA, 19 nt, Artificial Sequence
  Description of Artificial Sequence: Synthetic oligonucleotide
  Sense strand starting at position 738 of SEQ ID NO: 1889105
uugggaguuugacauggaa

SEQ ID NO: 2578673 - RNA, 19 nt, Artificial Sequence
  Description of Artificial Sequence: Synthetic oligonucleotide
  Antisense strand to SEQ ID NO: 2578672
uuccaugucaaacucccaa

SEQ ID NO: 2578674 - RNA, 19 nt, Artificial Sequence
  Description of Artificial Sequence: Synthetic oligonucleotide
  Sense strand starting at position 889 of SEQ ID NO: 1889105
uaauguuagccgggcauga

SEQ ID NO: 2578675 - RNA, 19 nt, Artificial Sequence
  Description of Artificial Sequence: Synthetic oligonucleotide
  Antisense strand to SEQ ID NO: 2578674
ucaugcccggcuaacauua

SEQ ID NO: 2578676 - RNA, 19 nt, Artificial Sequence
  Description of Artificial Sequence: Synthetic oligonucleotide
  Sense strand starting at position 1106 of SEQ ID NO: 1889105
ggguaucagugacagacuu

SEQ ID NO: 2578677 - RNA, 19 nt, Artificial Sequence
  Description of Artificial Sequence: Synthetic oligonucleotide
  Antisense strand to SEQ ID NO: 2578676
aagucugucacugauaccc

SEQ ID NO: 2578678 - RNA, 19 nt, Artificial Sequence
  Description of Artificial Sequence: Synthetic oligonucleotide
  Sense strand starting at position 1116 of SEQ ID NO: 1889105
gacagacuuuaguaagcau

SEQ ID NO: 2578679 - RNA, 19 nt, Artificial Sequence
  Description of Artificial Sequence: Synthetic oligonucleotide
  Antisense strand to SEQ ID NO: 2578678
augcuuacuaaagucuguc

SEQ ID NO: 2578680 - RNA, 19 nt, Artificial Sequence
  Description of Artificial Sequence: Synthetic oligonucleotide
  Sense strand starting at position 1125 of SEQ ID NO: 1889105
uaguaagcaugguuguuau

SEQ ID NO: 2578681 - RNA, 19 nt, Artificial Sequence
  Description of Artificial Sequence: Synthetic oligonucleotide
  Antisense strand to SEQ ID NO: 2578680
auaacaaccaugcuuacua

SEQ ID NO: 2578682 - RNA, 19 nt, Artificial Sequence
  Description of Artificial Sequence: Synthetic oligonucleotide
  Sense strand starting at position 1132 of SEQ ID NO: 1889105
caugguuguuaugccauau

SEQ ID NO: 2578683 - RNA, 19 nt, Artificial Sequence
  Description of Artificial Sequence: Synthetic oligonucleotide
  Antisense strand to SEQ ID NO: 2578682
auauggcauaacaaccaug

SEQ ID NO: 2578684 - RNA, 19 nt, Artificial Sequence
  Description of Artificial Sequence: Synthetic oligonucleotide
  Sense strand starting at position 1166 of SEQ ID NO: 1889105
ugaacuugaacccgggaau

SEQ ID NO: 2578685 - RNA, 19 nt, Artificial Sequence
  Description of Artificial Sequence: Synthetic oligonucleotide
  Antisense strand to SEQ ID NO: 2578684
auucccggguucaaguuca

SEQ ID NO: 2578686 - RNA, 19 nt, Artificial Sequence
  Description of Artificial Sequence: Synthetic oligonucleotide
  Sense strand starting at position 1167 of SEQ ID NO: 1889105
gaacuugaacccgggaauu

SEQ ID NO: 2578687 - RNA, 19 nt, Artificial Sequence
  Description of Artificial Sequence: Synthetic oligonucleotide
  Antisense strand to SEQ ID NO: 2578686
aauucccggguucaaguuc

SEQ ID NO: 2578688 - RNA, 19 nt, Artificial Sequence
  Description of Artificial Sequence: Synthetic oligonucleotide
  Sense strand starting at position 1218 of SEQ ID NO: 1889105
uacugcagucugggugaua

SEQ ID NO: 2578689 - RNA, 19 nt, Artificial Sequence
  Description of Artificial Sequence: Synthetic oligonucleotide
  Antisense strand to SEQ ID NO: 2578688
uaucacccagacugcagua

SEQ ID NO: 2578690 - RNA, 19 nt, Artificial Sequence
  Description of Artificial Sequence: Synthetic oligonucleotide
  Sense strand starting at position 1219 of SEQ ID NO: 1889105
acugcagucugggugauaa

SEQ ID NO: 2578691 - RNA, 19 nt, Artificial Sequence
  Description of Artificial Sequence: Synthetic oligonucleotide
  Antisense strand to SEQ ID NO: 2578690
uuaucacccagacugcagu

SEQ ID NO: 2578692 - RNA, 19 nt, Artificial Sequence
  Description of Artificial Sequence: Synthetic oligonucleotide
  Sense strand starting at position 1221 of SEQ ID NO: 1889105
ugcagucugggugauaaag

SEQ ID NO: 2578693 - RNA, 19 nt, Artificial Sequence
  Description of Artificial Sequence: Synthetic oligonucleotide
  Antisense strand to SEQ ID NO: 2578692
cuuuaucacccagacugca

SEQ ID NO: 2578694 - RNA, 19 nt, Artificial Sequence
  Description of Artificial Sequence: Synthetic oligonucleotide
  Sense strand starting at position 1331 of SEQ ID NO: 1889105
uaaacaaacuagugagagu

SEQ ID NO: 2578695 - RNA, 19 nt, Artificial Sequence
  Description of Artificial Sequence: Synthetic oligonucleotide
  Antisense strand to SEQ ID NO: 2578694
acucucacuaguuuguuua

SEQ ID NO: 2578696 - RNA, 19 nt, Artificial Sequence
  Description of Artificial Sequence: Synthetic oligonucleotide
  Sense strand starting at position 1588 of SEQ ID NO: 1889105
gaagguugaggcugugaug

SEQ ID NO: 2578697 - RNA, 19 nt, Artificial Sequence
  Description of Artificial Sequence: Synthetic oligonucleotide
  Antisense strand to SEQ ID NO: 2578696
caucacagccucaaccuuc

SEQ ID NO: 2578698 - RNA, 19 nt, Artificial Sequence
  Description of Artificial Sequence: Synthetic oligonucleotide
  Sense strand starting at position 1599 of SEQ ID NO: 1889105
cugugaugagccgagaaug

SEQ ID NO: 2578699 - RNA, 19 nt, Artificial Sequence
  Description of Artificial Sequence: Synthetic oligonucleotide
  Antisense strand to SEQ ID NO: 2578698
cauucucggcucaucacag

SEQ ID NO: 2578700 - RNA, 19 nt, Artificial Sequence
  Description of Artificial Sequence: Synthetic oligonucleotide
  Sense strand starting at position 1788 of SEQ ID NO: 1889105
gaagaaaugacguggugaa

SEQ ID NO: 2578701 - RNA, 19 nt, Artificial Sequence
  Description of Artificial Sequence: Synthetic oligonucleotide
  Antisense strand to SEQ ID NO: 2578700
uucaccacgucauuucuuc

SEQ ID NO: 2578702 - RNA, 19 nt, Artificial Sequence
  Description of Artificial Sequence: Synthetic oligonucleotide
  Sense strand starting at position 1789 of SEQ ID NO: 1889105
aagaaaugacguggugaaa

SEQ ID NO: 2578703 - RNA, 19 nt, Artificial Sequence
  Description of Artificial Sequence: Synthetic oligonucleotide
  Antisense strand to SEQ ID NO: 2578702
uuucaccacgucauuucuu

SEQ ID NO: 2578704 - RNA, 19 nt, Artificial Sequence
  Description of Artificial Sequence: Synthetic oligonucleotide
  Sense strand starting at position 2065 of SEQ ID NO: 1889105
ggcagugacugguucauau

SEQ ID NO: 2578705 - RNA, 19 nt, Artificial Sequence
  Description of Artificial Sequence: Synthetic oligonucleotide
  Antisense strand to SEQ ID NO: 2578704
auaugaaccagucacugcc

SEQ ID NO: 2578706 - RNA, 19 nt, Artificial Sequence
  Description of Artificial Sequence: Synthetic oligonucleotide
  Sense strand starting at position 2201 of SEQ ID NO: 1889105
gagucauucucaccaggcu

SEQ ID NO: 2578707 - RNA, 19 nt, Artificial Sequence
  Description of Artificial Sequence: Synthetic oligonucleotide
  Antisense strand to SEQ ID NO: 2578706
agccuggugagaaugacuc

SEQ ID NO: 2578708 - RNA, 19 nt, Artificial Sequence
  Description of Artificial Sequence: Synthetic oligonucleotide
  Sense strand starting at position 2463 of SEQ ID NO: 1889105
gggaagagguucucgggaa

SEQ ID NO: 2578709 - RNA, 19 nt, Artificial Sequence
  Description of Artificial Sequence: Synthetic oligonucleotide
  Antisense strand to SEQ ID NO: 2578708
uucccgagaaccucuuccc

SEQ ID NO: 2578710 - RNA, 19 nt, Artificial Sequence
  Description of Artificial Sequence: Synthetic oligonucleotide
  Sense strand starting at position 2464 of SEQ ID NO: 1889105
ggaagagguucucgggaac

SEQ ID NO: 2578711 - RNA, 19 nt, Artificial Sequence
  Description of Artificial Sequence: Synthetic oligonucleotide
  Antisense strand to SEQ ID NO: 2578710
guucccgagaaccucuucc

SEQ ID NO: 2578712 - RNA, 19 nt, Artificial Sequence
  Description of Artificial Sequence: Synthetic oligonucleotide
  Sense strand starting at position 2499 of SEQ ID NO: 1889105
gguauaugucaagggcuga

SEQ ID NO: 2578713 - RNA, 19 nt, Artificial Sequence
  Description of Artificial Sequence: Synthetic oligonucleotide
  Antisense strand to SEQ ID NO: 2578712
ucagcccuugacauauacc

SEQ ID NO: 2578714 - RNA, 19 nt, Artificial Sequence
  Description of Artificial Sequence: Synthetic oligonucleotide
  Sense strand starting at position 2503 of SEQ ID NO: 1889105
uaugucaagggcugaauua

SEQ ID NO: 2578715 - RNA, 19 nt, Artificial Sequence
  Description of Artificial Sequence: Synthetic oligonucleotide
  Antisense strand to SEQ ID NO: 2578714
uaauucagcccuugacaua

SEQ ID NO: 2578716 - RNA, 19 nt, Artificial Sequence
  Description of Artificial Sequence: Synthetic oligonucleotide
  Sense strand starting at position 2624 of SEQ ID NO: 1889105
gcugcucugcuccauggaa

SEQ ID NO: 2578717 - RNA, 19 nt, Artificial Sequence
  Description of Artificial Sequence: Synthetic oligonucleotide
  Antisense strand to SEQ ID NO: 2578716
uuccauggagcagagcagc

SEQ ID NO: 2578718 - RNA, 19 nt, Artificial Sequence
  Description of Artificial Sequence: Synthetic oligonucleotide
  Sense strand starting at position 2662 of SEQ ID NO: 1889105
gacgucugcgaauaguuua

SEQ ID NO: 2578719 - RNA, 19 nt, Artificial Sequence
  Description of Artificial Sequence: Synthetic oligonucleotide
  Antisense strand to SEQ ID NO: 2578718
uaaacuauucgcagacguc

SEQ ID NO: 2578720 - RNA, 19 nt, Artificial Sequence
  Description of Artificial Sequence: Synthetic oligonucleotide
  Sense strand starting at position 2693 of SEQ ID NO: 1889105
ccacaaacacguuauguga

SEQ ID NO: 2578721 - RNA, 19 nt, Artificial Sequence
  Description of Artificial Sequence: Synthetic oligonucleotide
  Antisense strand to SEQ ID NO: 2578720
ucacauaacguguuugugg

SEQ ID NO: 2578722 - RNA, 19 nt, Artificial Sequence
  Description of Artificial Sequence: Synthetic oligonucleotide
  Sense strand starting at position 2934 of SEQ ID NO: 1889105
ccuaaucccgcuuauagua

SEQ ID NO: 2578723 - RNA, 19 nt, Artificial Sequence
  Description of Artificial Sequence: Synthetic oligonucleotide
  Antisense strand to SEQ ID NO: 2578722
uacuauaagcgggauuagg

SEQ ID NO: 2578724 - RNA, 19 nt, Artificial Sequence
  Description of Artificial Sequence: Synthetic oligonucleotide
  Sense strand starting at position 2995 of SEQ ID NO: 1889105
gucugaaccugugauuucu

SEQ ID NO: 2578725 - RNA, 19 nt, Artificial Sequence
  Description of Artificial Sequence: Synthetic oligonucleotide
  Antisense strand to SEQ ID NO: 2578724
agaaaucacagguucagac

SEQ ID NO: 2578726 - RNA, 19 nt, Artificial Sequence
  Description of Artificial Sequence: Synthetic oligonucleotide
  Sense strand starting at position 3006 of SEQ ID NO: 1889105
ugauuucucuacuaaugag

SEQ ID NO: 2578727 - RNA, 19 nt, Artificial Sequence
  Description of Artificial Sequence: Synthetic oligonucleotide
  Antisense strand to SEQ ID NO: 2578726
cucauuaguagagaaauca

SEQ ID NO: 2578728 - RNA, 19 nt, Artificial Sequence
  Description of Artificial Sequence: Synthetic oligonucleotide
  Sense strand starting at position 3160 of SEQ ID NO: 1889105
cugccuuguccuucgcaaa

SEQ ID NO: 2578729 - RNA, 19 nt, Artificial Sequence
  Description of Artificial Sequence: Synthetic oligonucleotide
  Antisense strand to SEQ ID NO: 2578728
uuugcgaaggacaaggcag

SEQ ID NO: 2578730 - RNA, 19 nt, Artificial Sequence
  Description of Artificial Sequence: Synthetic oligonucleotide
  Sense strand starting at position 3524 of SEQ ID NO: 1889105
aagcaaucugccugcguua

SEQ ID NO: 2578731 - RNA, 19 nt, Artificial Sequence
  Description of Artificial Sequence: Synthetic oligonucleotide
  Antisense strand to SEQ ID NO: 2578730
uaacgcaggcagauugcuu

SEQ ID NO: 2578732 - RNA, 19 nt, Artificial Sequence
  Description of Artificial Sequence: Synthetic oligonucleotide
  Sense strand starting at position 3718 of SEQ ID NO: 1889105
cugaucucagcuuacugaa

SEQ ID NO: 2578733 - RNA, 19 nt, Artificial Sequence
  Description of Artificial Sequence: Synthetic oligonucleotide
  Antisense strand to SEQ ID NO: 2578732
uucaguaagcugagaucag

SEQ ID NO: 2578734 - RNA, 19 nt, Artificial Sequence
  Description of Artificial Sequence: Synthetic oligonucleotide
  Sense strand starting at position 3976 of SEQ ID NO: 1889105
uugaaauagugucuccauc

SEQ ID NO: 2578735 - RNA, 19 nt, Artificial Sequence
  Description of Artificial Sequence: Synthetic oligonucleotide
  Antisense strand to SEQ ID NO: 2578734
gauggagacacuauuucaa

SEQ ID NO: 2578736 - RNA, 19 nt, Artificial Sequence
  Description of Artificial Sequence: Synthetic oligonucleotide
  Sense strand starting at position 69 of SEQ ID NO: 1889106
accauuaugaggugaucag

SEQ ID NO: 2578737 - RNA, 19 nt, Artificial Sequence
  Description of Artificial Sequence: Synthetic oligonucleotide
  Antisense strand to SEQ ID NO: 2578736
cugaucaccucauaauggu

SEQ ID NO: 2578738 - RNA, 19 nt, Artificial Sequence
  Description of Artificial Sequence: Synthetic oligonucleotide
  Sense strand starting at position 143 of SEQ ID NO: 1889106
agaacuaaaucugugcuaa

SEQ ID NO: 2578739 - RNA, 19 nt, Artificial Sequence
  Description of Artificial Sequence: Synthetic oligonucleotide
  Antisense strand to SEQ ID NO: 2578738
uuagcacagauuuaguucu

SEQ ID NO: 2578740 - RNA, 19 nt, Artificial Sequence
  Description of Artificial Sequence: Synthetic oligonucleotide
  Sense strand starting at position 185 of SEQ ID NO: 1889106
ggugcugagaaaugauuga

SEQ ID NO: 2578741 - RNA, 19 nt, Artificial Sequence
  Description of Artificial Sequence: Synthetic oligonucleotide
  Antisense strand to SEQ ID NO: 2578740
ucaaucauuucucagcacc

SEQ ID NO: 2578742 - RNA, 19 nt, Artificial Sequence
  Description of Artificial Sequence: Synthetic oligonucleotide
  Sense strand starting at position 404 of SEQ ID NO: 1889106
gauacagugucagugagau

SEQ ID NO: 2578743 - RNA, 19 nt, Artificial Sequence
  Description of Artificial Sequence: Synthetic oligonucleotide
  Antisense strand to SEQ ID NO: 2578742
aucucacugacacuguauc

SEQ ID NO: 2578744 - RNA, 19 nt, Artificial Sequence
  Description of Artificial Sequence: Synthetic oligonucleotide
  Sense strand starting at position 426 of SEQ ID NO: 1889106
acuccuggugcagagaaau

SEQ ID NO: 2578745 - RNA, 19 nt, Artificial Sequence
  Description of Artificial Sequence: Synthetic oligonucleotide
  Antisense strand to SEQ ID NO: 2578744
auuucucugcaccaggagu

SEQ ID NO: 2578746 - RNA, 19 nt, Artificial Sequence
  Description of Artificial Sequence: Synthetic oligonucleotide
  Sense strand starting at position 436 of SEQ ID NO: 1889106
cagagaaaugcaggcagaa

SEQ ID NO: 2578747 - RNA, 19 nt, Artificial Sequence
  Description of Artificial Sequence: Synthetic oligonucleotide
  Antisense strand to SEQ ID NO: 2578746
uucugccugcauuucucug

SEQ ID NO: 2578748 - RNA, 19 nt, Artificial Sequence
  Description of Artificial Sequence: Synthetic oligonucleotide
  Sense strand starting at position 553 of SEQ ID NO: 1889106
auaagacagugaucugcuu

SEQ ID NO: 2578749 - RNA, 19 nt, Artificial Sequence
  Description of Artificial Sequence: Synthetic oligonucleotide
  Antisense strand to SEQ ID NO: 2578748
aagcagaucacugucuuau

SEQ ID NO: 2578750 - RNA, 19 nt, Artificial Sequence
  Description of Artificial Sequence: Synthetic oligonucleotide
  Sense strand starting at position 757 of SEQ ID NO: 1889106
auggguauuguccagauuc

SEQ ID NO: 2578751 - RNA, 19 nt, Artificial Sequence
  Description of Artificial Sequence: Synthetic oligonucleotide
  Antisense strand to SEQ ID NO: 2578750
gaaucuggacaauacccau

SEQ ID NO: 2578752 - RNA, 19 nt, Artificial Sequence
  Description of Artificial Sequence: Synthetic oligonucleotide
  Sense strand starting at position 759 of SEQ ID NO: 1889106
ggguauuguccagauucag

SEQ ID NO: 2578753 - RNA, 19 nt, Artificial Sequence
  Description of Artificial Sequence: Synthetic oligonucleotide
  Antisense strand to SEQ ID NO: 2578752
cugaaucuggacaauaccc

SEQ ID NO: 2578754 - RNA, 19 nt, Artificial Sequence
  Description of Artificial Sequence: Synthetic oligonucleotide
  Sense strand starting at position 782 of SEQ ID NO: 1889106
gacugagagccugaguguu

SEQ ID NO: 2578755 - RNA, 19 nt, Artificial Sequence
  Description of Artificial Sequence: Synthetic oligonucleotide
  Antisense strand to SEQ ID NO: 2578754
aacacucaggcucucaguc

SEQ ID NO: 2578756 - RNA, 19 nt, Artificial Sequence
  Description of Artificial Sequence: Synthetic oligonucleotide
  Sense strand starting at position 881 of SEQ ID NO: 1889106
gaacuugagggaugcagua

SEQ ID NO: 2578757 - RNA, 19 nt, Artificial Sequence
  Description of Artificial Sequence: Synthetic oligonucleotide
  Antisense strand to SEQ ID NO: 2578756
uacugcaucccucaaguuc

SEQ ID NO: 2578758 - RNA, 19 nt, Artificial Sequence
  Description of Artificial Sequence: Synthetic oligonucleotide
  Sense strand starting at position 1145 of SEQ ID NO: 1889106
gcaaauauagaauguaaag

SEQ ID NO: 2578759 - RNA, 19 nt, Artificial Sequence
  Description of Artificial Sequence: Synthetic oligonucleotide
  Antisense strand to SEQ ID NO: 2578758
cuuuacauucuauauuugc

SEQ ID NO: 2578760 - RNA, 19 nt, Artificial Sequence
  Description of Artificial Sequence: Synthetic oligonucleotide
  Sense strand starting at position 1187 of SEQ ID NO: 1889106
gagaguucucacuagagcu

SEQ ID NO: 2578761 - RNA, 19 nt, Artificial Sequence
  Description of Artificial Sequence: Synthetic oligonucleotide
  Antisense strand to SEQ ID NO: 2578760
agcucuagugagaacucuc

SEQ ID NO: 2578762 - RNA, 19 nt, Artificial Sequence
  Description of Artificial Sequence: Synthetic oligonucleotide
  Sense strand starting at position 1439 of SEQ ID NO: 1889106
gggacaugggucugauucu

SEQ ID NO: 2578763 - RNA, 19 nt, Artificial Sequence
  Description of Artificial Sequence: Synthetic oligonucleotide
  Antisense strand to SEQ ID NO: 2578762
agaaucagacccauguccc

SEQ ID NO: 2578764 - RNA, 19 nt, Artificial Sequence
  Description of Artificial Sequence: Synthetic oligonucleotide
  Sense strand starting at position 1460 of SEQ ID NO: 1889106
auauaaugagaaggcucua

SEQ ID NO: 2578765 - RNA, 19 nt, Artificial Sequence
  Description of Artificial Sequence: Synthetic oligonucleotide
  Antisense strand to SEQ ID NO: 2578764
uagagccuucucauuauau

SEQ ID NO: 2578766 - RNA, 19 nt, Artificial Sequence
  Description of Artificial Sequence: Synthetic oligonucleotide
  Sense strand starting at position 1530 of SEQ ID NO: 1889106
uucuuacuaguguagaaug

SEQ ID NO: 2578767 - RNA, 19 nt, Artificial Sequence
  Description of Artificial Sequence: Synthetic oligonucleotide
  Antisense strand to SEQ ID NO: 2578766
cauucuacacuaguaagaa

SEQ ID NO: 2578768 - RNA, 19 nt, Artificial Sequence
  Description of Artificial Sequence: Synthetic oligonucleotide
  Sense strand starting at position 1567 of SEQ ID NO: 1889106
ggaagcgacuuuccaauau

SEQ ID NO: 2578769 - RNA, 19 nt, Artificial Sequence
  Description of Artificial Sequence: Synthetic oligonucleotide
  Antisense strand to SEQ ID NO: 2578768
auauuggaaagucgcuucc

SEQ ID NO: 2578770 - RNA, 19 nt, Artificial Sequence
  Description of Artificial Sequence: Synthetic oligonucleotide
  Sense strand starting at position 1571 of SEQ ID NO: 1889106
gcgacuuuccaauaucaca

SEQ ID NO: 2578771 - RNA, 19 nt, Artificial Sequence
  Description of Artificial Sequence: Synthetic oligonucleotide
  Antisense strand to SEQ ID NO: 2578770
ugugauauuggaaagucgc

SEQ ID NO: 2578772 - RNA, 19 nt, Artificial Sequence
  Description of Artificial Sequence: Synthetic oligonucleotide
  Sense strand starting at position 1579 of SEQ ID NO: 1889106
ccaauaucacagugcugga

SEQ ID NO: 2578773 - RNA, 19 nt, Artificial Sequence
  Description of Artificial Sequence: Synthetic oligonucleotide
  Antisense strand to SEQ ID NO: 2578772
uccagcacugugauauugg

SEQ ID NO: 2578774 - RNA, 19 nt, Artificial Sequence
  Description of Artificial Sequence: Synthetic oligonucleotide
  Sense strand starting at position 1668 of SEQ ID NO: 1889106
gugcauugucuacauggga

SEQ ID NO: 2578775 - RNA, 19 nt, Artificial Sequence
  Description of Artificial Sequence: Synthetic oligonucleotide
  Antisense strand to SEQ ID NO: 2578774
ucccauguagacaaugcac

SEQ ID NO: 2578776 - RNA, 19 nt, Artificial Sequence
  Description of Artificial Sequence: Synthetic oligonucleotide
  Sense strand starting at position 1728 of SEQ ID NO: 1889106
cgaugaguucccuagggag

SEQ ID NO: 2578777 - RNA, 19 nt, Artificial Sequence
  Description of Artificial Sequence: Synthetic oligonucleotide
  Antisense strand to SEQ ID NO: 2578776
cucccuagggaacucaucg

SEQ ID NO: 2578778 - RNA, 19 nt, Artificial Sequence
  Description of Artificial Sequence: Synthetic oligonucleotide
  Sense strand starting at position 1730 of SEQ ID NO: 1889106
augaguucccuagggagau

SEQ ID NO: 2578779 - RNA, 19 nt, Artificial Sequence
  Description of Artificial Sequence: Synthetic oligonucleotide
  Antisense strand to SEQ ID NO: 2578778
aucucccuagggaacucau

SEQ ID NO: 2578780 - RNA, 19 nt, Artificial Sequence
  Description of Artificial Sequence: Synthetic oligonucleotide
  Sense strand starting at position 1740 of SEQ ID NO: 1889106
uagggagaugcuggcauau

SEQ ID NO: 2578781 - RNA, 19 nt, Artificial Sequence
  Description of Artificial Sequence: Synthetic oligonucleotide
  Antisense strand to SEQ ID NO: 2578780
auaugccagcaucucccua

SEQ ID NO: 2578782 - RNA, 19 nt, Artificial Sequence
  Description of Artificial Sequence: Synthetic oligonucleotide
  Sense strand starting at position 1832 of SEQ ID NO: 1889106
cuagguucuuacccagauc

SEQ ID NO: 2578783 - RNA, 19 nt, Artificial Sequence
  Description of Artificial Sequence: Synthetic oligonucleotide
  Antisense strand to SEQ ID NO: 2578782
gaucuggguaagaaccuag

SEQ ID NO: 2578784 - RNA, 19 nt, Artificial Sequence
  Description of Artificial Sequence: Synthetic oligonucleotide
  Sense strand starting at position 1835 of SEQ ID NO: 1889106
gguucuuacccagaucuau

SEQ ID NO: 2578785 - RNA, 19 nt, Artificial Sequence
  Description of Artificial Sequence: Synthetic oligonucleotide
  Antisense strand to SEQ ID NO: 2578784
auagaucuggguaagaacc

SEQ ID NO: 2578786 - RNA, 19 nt, Artificial Sequence
  Description of Artificial Sequence: Synthetic oligonucleotide
  Sense strand starting at position 2145 of SEQ ID NO: 1889106
uguuuaacagagcacaaua

SEQ ID NO: 2578787 - RNA, 19 nt, Artificial Sequence
  Description of Artificial Sequence: Synthetic oligonucleotide
  Antisense strand to SEQ ID NO: 2578786
uauugugcucuguuaaaca

SEQ ID NO: 2578788 - RNA, 19 nt, Artificial Sequence
  Description of Artificial Sequence: Synthetic oligonucleotide
  Sense strand starting at position 2171 of SEQ ID NO: 1889106
gguagaucccaauacucuu

SEQ ID NO: 2578789 - RNA, 19 nt, Artificial Sequence
  Description of Artificial Sequence: Synthetic oligonucleotide
  Antisense strand to SEQ ID NO: 2578788
aagaguauugggaucuacc

SEQ ID NO: 2578790 - RNA, 19 nt, Artificial Sequence
  Description of Artificial Sequence: Synthetic oligonucleotide
  Sense strand starting at position 2237 of SEQ ID NO: 1889106
cugacauuggcuuauucca

SEQ ID NO: 2578791 - RNA, 19 nt, Artificial Sequence
  Description of Artificial Sequence: Synthetic oligonucleotide
  Antisense strand to SEQ ID NO: 2578790
uggaauaagccaaugucag

SEQ ID NO: 2578792 - RNA, 19 nt, Artificial Sequence
  Description of Artificial Sequence: Synthetic oligonucleotide
  Sense strand starting at position 2259 of SEQ ID NO: 1889106
accagaugucucuggaaau

SEQ ID NO: 2578793 - RNA, 19 nt, Artificial Sequence
  Description of Artificial Sequence: Synthetic oligonucleotide
  Antisense strand to SEQ ID NO: 2578792
auuuccagagacaucuggu

SEQ ID NO: 2578794 - RNA, 19 nt, Artificial Sequence
  Description of Artificial Sequence: Synthetic oligonucleotide
  Sense strand starting at position 2426 of SEQ ID NO: 1889106
uuauuagauucccuaaggu

SEQ ID NO: 2578795 - RNA, 19 nt, Artificial Sequence
  Description of Artificial Sequence: Synthetic oligonucleotide
  Antisense strand to SEQ ID NO: 2578794
accuuagggaaucuaauaa

SEQ ID NO: 2578796 - RNA, 19 nt, Artificial Sequence
  Description of Artificial Sequence: Synthetic oligonucleotide
  Sense strand starting at position 2585 of SEQ ID NO: 1889106
ccaaguagccgagagacua

SEQ ID NO: 2578797 - RNA, 19 nt, Artificial Sequence
  Description of Artificial Sequence: Synthetic oligonucleotide
  Antisense strand to SEQ ID NO: 2578796
uagucucucggcuacuugg

SEQ ID NO: 2578798 - RNA, 19 nt, Artificial Sequence
  Description of Artificial Sequence: Synthetic oligonucleotide
  Sense strand starting at position 2734 of SEQ ID NO: 1889106
aaauaugcuagguguagga

SEQ ID NO: 2578799 - RNA, 19 nt, Artificial Sequence
  Description of Artificial Sequence: Synthetic oligonucleotide
  Antisense strand to SEQ ID NO: 2578798
uccuacaccuagcauauuu

SEQ ID NO: 2578800 - RNA, 19 nt, Artificial Sequence
  Description of Artificial Sequence: Synthetic oligonucleotide
  Sense strand starting at position 2736 of SEQ ID NO: 1889106
auaugcuagguguaggauu

SEQ ID NO: 2578801 - RNA, 19 nt, Artificial Sequence
  Description of Artificial Sequence: Synthetic oligonucleotide
  Antisense strand to SEQ ID NO: 2578800
aauccuacaccuagcauau

SEQ ID NO: 2578802 - RNA, 19 nt, Artificial Sequence
  Description of Artificial Sequence: Synthetic oligonucleotide
  Sense strand starting at position 2748 of SEQ ID NO: 1889106
uaggauucuuagucgagag

SEQ ID NO: 2578803 - RNA, 19 nt, Artificial Sequence
  Description of Artificial Sequence: Synthetic oligonucleotide
  Antisense strand to SEQ ID NO: 2578802
cucucgacuaagaauccua

SEQ ID NO: 2578804 - RNA, 19 nt, Artificial Sequence
  Description of Artificial Sequence: Synthetic oligonucleotide
  Sense strand starting at position 2750 of SEQ ID NO: 1889106
ggauucuuagucgagagcu

SEQ ID NO: 2578805 - RNA, 19 nt, Artificial Sequence
  Description of Artificial Sequence: Synthetic oligonucleotide
  Antisense strand to SEQ ID NO: 2578804
agcucucgacuaagaaucc

SEQ ID NO: 2578806 - RNA, 19 nt, Artificial Sequence
  Description of Artificial Sequence: Synthetic oligonucleotide
  Sense strand starting at position 3077 of SEQ ID NO: 1889106
guugcucugcacuaagaaa

SEQ ID NO: 2578807 - RNA, 19 nt, Artificial Sequence
  Description of Artificial Sequence: Synthetic oligonucleotide
  Antisense strand to SEQ ID NO: 2578806
uuucuuagugcagagcaac

SEQ ID NO: 2578808 - RNA, 19 nt, Artificial Sequence
  Description of Artificial Sequence: Synthetic oligonucleotide
  Sense strand starting at position 3156 of SEQ ID NO: 1889106
aucauaaaugugcaguuau

SEQ ID NO: 2578809 - RNA, 19 nt, Artificial Sequence
  Description of Artificial Sequence: Synthetic oligonucleotide
  Antisense strand to SEQ ID NO: 2578808
auaacugcacauuuaugau

SEQ ID NO: 2578810 - RNA, 19 nt, Artificial Sequence
  Description of Artificial Sequence: Synthetic oligonucleotide
  Sense strand starting at position 3661 of SEQ ID NO: 1889106
acacaaguuccuggaaauu

SEQ ID NO: 2578811 - RNA, 19 nt, Artificial Sequence
  Description of Artificial Sequence: Synthetic oligonucleotide
  Antisense strand to SEQ ID NO: 2578810
aauuuccaggaacuugugu

SEQ ID NO: 2578812 - RNA, 19 nt, Artificial Sequence
  Description of Artificial Sequence: Synthetic oligonucleotide
  Sense strand starting at position 3781 of SEQ ID NO: 1889106
uacuacgugacaggugaaa

SEQ ID NO: 2578813 - RNA, 19 nt, Artificial Sequence
  Description of Artificial Sequence: Synthetic oligonucleotide
  Antisense strand to SEQ ID NO: 2578812
uuucaccugucacguagua

SEQ ID NO: 2578814 - RNA, 19 nt, Artificial Sequence
  Description of Artificial Sequence: Synthetic oligonucleotide
  Sense strand starting at position 3824 of SEQ ID NO: 1889106
gcaagaugccuugacuuag

SEQ ID NO: 2578815 - RNA, 19 nt, Artificial Sequence
  Description of Artificial Sequence: Synthetic oligonucleotide
  Antisense strand to SEQ ID NO: 2578814
cuaagucaaggcaucuugc

SEQ ID NO: 2578816 - RNA, 19 nt, Artificial Sequence
  Description of Artificial Sequence: Synthetic oligonucleotide
  Sense strand starting at position 142 of SEQ ID NO: 1889107
agaacuaaaucugugcuaa

SEQ ID NO: 2578817 - RNA, 19 nt, Artificial Sequence
  Description of Artificial Sequence: Synthetic oligonucleotide
  Antisense strand to SEQ ID NO: 2578816
uuagcacagauuuaguucu

SEQ ID NO: 2578818 - RNA, 19 nt, Artificial Sequence
  Description of Artificial Sequence: Synthetic oligonucleotide
  Sense strand starting at position 403 of SEQ ID NO: 1889107
gauacagugucagugagau

SEQ ID NO: 2578819 - RNA, 19 nt, Artificial Sequence
  Description of Artificial Sequence: Synthetic oligonucleotide
  Antisense strand to SEQ ID NO: 2578818
aucucacugacacuguauc

SEQ ID NO: 2578820 - RNA, 19 nt, Artificial Sequence
  Description of Artificial Sequence: Synthetic oligonucleotide
  Sense strand starting at position 425 of SEQ ID NO: 1889107
acuccuggugcagagaaau

SEQ ID NO: 2578821 - RNA, 19 nt, Artificial Sequence
  Description of Artificial Sequence: Synthetic oligonucleotide
  Antisense strand to SEQ ID NO: 2578820
auuucucugcaccaggagu

SEQ ID NO: 2578822 - RNA, 19 nt, Artificial Sequence
  Description of Artificial Sequence: Synthetic oligonucleotide
  Sense strand starting at position 435 of SEQ ID NO: 1889107
cagagaaaugcaggcagaa

SEQ ID NO: 2578823 - RNA, 19 nt, Artificial Sequence
  Description of Artificial Sequence: Synthetic oligonucleotide
  Antisense strand to SEQ ID NO: 2578822
uucugccugcauuucucug

SEQ ID NO: 2578824 - RNA, 19 nt, Artificial Sequence
  Description of Artificial Sequence: Synthetic oligonucleotide
  Sense strand starting at position 437 of SEQ ID NO: 1889107
gagaaaugcaggcagaagu

SEQ ID NO: 2578825 - RNA, 19 nt, Artificial Sequence
  Description of Artificial Sequence: Synthetic oligonucleotide
  Antisense strand to SEQ ID NO: 2578824
acuucugccugcauuucuc

SEQ ID NO: 2578826 - RNA, 19 nt, Artificial Sequence
  Description of Artificial Sequence: Synthetic oligonucleotide
  Sense strand starting at position 552 of SEQ ID NO: 1889107
auaagacagugaucugcuu

SEQ ID NO: 2578827 - RNA, 19 nt, Artificial Sequence
  Description of Artificial Sequence: Synthetic oligonucleotide
  Antisense strand to SEQ ID NO: 2578826
aagcagaucacugucuuau

SEQ ID NO: 2578828 - RNA, 19 nt, Artificial Sequence
  Description of Artificial Sequence: Synthetic oligonucleotide
  Sense strand starting at position 756 of SEQ ID NO: 1889107
auggguauuguccagauuc

SEQ ID NO: 2578829 - RNA, 19 nt, Artificial Sequence
  Description of Artificial Sequence: Synthetic oligonucleotide
  Antisense strand to SEQ ID NO: 2578828
gaaucuggacaauacccau

SEQ ID NO: 2578830 - RNA, 19 nt, Artificial Sequence
  Description of Artificial Sequence: Synthetic oligonucleotide
  Sense strand starting at position 758 of SEQ ID NO: 1889107
ggguauuguccagauucag

SEQ ID NO: 2578831 - RNA, 19 nt, Artificial Sequence
  Description of Artificial Sequence: Synthetic oligonucleotide
  Antisense strand to SEQ ID NO: 2578830
cugaaucuggacaauaccc

SEQ ID NO: 2578832 - RNA, 19 nt, Artificial Sequence
  Description of Artificial Sequence: Synthetic oligonucleotide
  Sense strand starting at position 781 of SEQ ID NO: 1889107
gacugagagccugaguguu

SEQ ID NO: 2578833 - RNA, 19 nt, Artificial Sequence
  Description of Artificial Sequence: Synthetic oligonucleotide
  Antisense strand to SEQ ID NO: 2578832
aacacucaggcucucaguc

SEQ ID NO: 2578834 - RNA, 19 nt, Artificial Sequence
  Description of Artificial Sequence: Synthetic oligonucleotide
  Sense strand starting at position 880 of SEQ ID NO: 1889107
gaacuugagggaugcagua

SEQ ID NO: 2578835 - RNA, 19 nt, Artificial Sequence
  Description of Artificial Sequence: Synthetic oligonucleotide
  Antisense strand to SEQ ID NO: 2578834
uacugcaucccucaaguuc

SEQ ID NO: 2578836 - RNA, 19 nt, Artificial Sequence
  Description of Artificial Sequence: Synthetic oligonucleotide
  Sense strand starting at position 1144 of SEQ ID NO: 1889107
gcaaauauagaauguaaag

SEQ ID NO: 2578837 - RNA, 19 nt, Artificial Sequence
  Description of Artificial Sequence: Synthetic oligonucleotide
  Antisense strand to SEQ ID NO: 2578836
cuuuacauucuauauuugc

SEQ ID NO: 2578838 - RNA, 19 nt, Artificial Sequence
  Description of Artificial Sequence: Synthetic oligonucleotide
  Sense strand starting at position 1186 of SEQ ID NO: 1889107
gagaguucucacuagagcu

SEQ ID NO: 2578839 - RNA, 19 nt, Artificial Sequence
  Description of Artificial Sequence: Synthetic oligonucleotide
  Antisense strand to SEQ ID NO: 2578838
agcucuagugagaacucuc

SEQ ID NO: 2578840 - RNA, 19 nt, Artificial Sequence
  Description of Artificial Sequence: Synthetic oligonucleotide
  Sense strand starting at position 1438 of SEQ ID NO: 1889107
gggacaugggucugauucu

SEQ ID NO: 2578841 - RNA, 19 nt, Artificial Sequence
  Description of Artificial Sequence: Synthetic oligonucleotide
  Antisense strand to SEQ ID NO: 2578840
agaaucagacccauguccc

SEQ ID NO: 2578842 - RNA, 19 nt, Artificial Sequence
  Description of Artificial Sequence: Synthetic oligonucleotide
  Sense strand starting at position 1459 of SEQ ID NO: 1889107
auauaaugagaaggcucua

SEQ ID NO: 2578843 - RNA, 19 nt, Artificial Sequence
  Description of Artificial Sequence: Synthetic oligonucleotide
  Antisense strand to SEQ ID NO: 2578842
uagagccuucucauuauau

SEQ ID NO: 2578844 - RNA, 19 nt, Artificial Sequence
  Description of Artificial Sequence: Synthetic oligonucleotide
  Sense strand starting at position 1529 of SEQ ID NO: 1889107
uucuuacuaguguagaaug

SEQ ID NO: 2578845 - RNA, 19 nt, Artificial Sequence
  Description of Artificial Sequence: Synthetic oligonucleotide
  Antisense strand to SEQ ID NO: 2578844
cauucuacacuaguaagaa

SEQ ID NO: 2578846 - RNA, 19 nt, Artificial Sequence
  Description of Artificial Sequence: Synthetic oligonucleotide
  Sense strand starting at position 1578 of SEQ ID NO: 1889107
ccaauaucacagugcugga

SEQ ID NO: 2578847 - RNA, 19 nt, Artificial Sequence
  Description of Artificial Sequence: Synthetic oligonucleotide
  Antisense strand to SEQ ID NO: 2578846
uccagcacugugauauugg

SEQ ID NO: 2578848 - RNA, 19 nt, Artificial Sequence
  Description of Artificial Sequence: Synthetic oligonucleotide
  Sense strand starting at position 1667 of SEQ ID NO: 1889107
gugcauugucuacauggga

SEQ ID NO: 2578849 - RNA, 19 nt, Artificial Sequence
  Description of Artificial Sequence: Synthetic oligonucleotide
  Antisense strand to SEQ ID NO: 2578848
ucccauguagacaaugcac

SEQ ID NO: 2578850 - RNA, 19 nt, Artificial Sequence
  Description of Artificial Sequence: Synthetic oligonucleotide
  Sense strand starting at position 1727 of SEQ ID NO: 1889107
cgaugaguucccuagggag

SEQ ID NO: 2578851 - RNA, 19 nt, Artificial Sequence
  Description of Artificial Sequence: Synthetic oligonucleotide
  Antisense strand to SEQ ID NO: 2578850
cucccuagggaacucaucg

SEQ ID NO: 2578852 - RNA, 19 nt, Artificial Sequence
  Description of Artificial Sequence: Synthetic oligonucleotide
  Sense strand starting at position 1729 of SEQ ID NO: 1889107
augaguucccuagggagau

SEQ ID NO: 2578853 - RNA, 19 nt, Artificial Sequence
  Description of Artificial Sequence: Synthetic oligonucleotide
  Antisense strand to SEQ ID NO: 2578852
aucucccuagggaacucau

SEQ ID NO: 2578854 - RNA, 19 nt, Artificial Sequence
  Description of Artificial Sequence: Synthetic oligonucleotide
  Sense strand starting at position 1739 of SEQ ID NO: 1889107
uagggagaugcuggcauau

SEQ ID NO: 2578855 - RNA, 19 nt, Artificial Sequence
  Description of Artificial Sequence: Synthetic oligonucleotide
  Antisense strand to SEQ ID NO: 2578854
auaugccagcaucucccua

SEQ ID NO: 2578856 - RNA, 19 nt, Artificial Sequence
  Description of Artificial Sequence: Synthetic oligonucleotide
  Sense strand starting at position 1831 of SEQ ID NO: 1889107
cuagguucuuacccagauc

SEQ ID NO: 2578857 - RNA, 19 nt, Artificial Sequence
  Description of Artificial Sequence: Synthetic oligonucleotide
  Antisense strand to SEQ ID NO: 2578856
gaucuggguaagaaccuag

SEQ ID NO: 2578858 - RNA, 19 nt, Artificial Sequence
  Description of Artificial Sequence: Synthetic oligonucleotide
  Sense strand starting at position 1834 of SEQ ID NO: 1889107
gguucuuacccagaucuau

SEQ ID NO: 2578859 - RNA, 19 nt, Artificial Sequence
  Description of Artificial Sequence: Synthetic oligonucleotide
  Antisense strand to SEQ ID NO: 2578858
auagaucuggguaagaacc

SEQ ID NO: 2578860 - RNA, 19 nt, Artificial Sequence
  Description of Artificial Sequence: Synthetic oligonucleotide
  Sense strand starting at position 1937 of SEQ ID NO: 1889107
agaguugacacgcagggau

SEQ ID NO: 2578861 - RNA, 19 nt, Artificial Sequence
  Description of Artificial Sequence: Synthetic oligonucleotide
  Antisense strand to SEQ ID NO: 2578860
aucccugcgugucaacucu

SEQ ID NO: 2578862 - RNA, 19 nt, Artificial Sequence
  Description of Artificial Sequence: Synthetic oligonucleotide
  Sense strand starting at position 2144 of SEQ ID NO: 1889107
uguuuaacagagcacaaua

SEQ ID NO: 2578863 - RNA, 19 nt, Artificial Sequence
  Description of Artificial Sequence: Synthetic oligonucleotide
  Antisense strand to SEQ ID NO: 2578862
uauugugcucuguuaaaca

SEQ ID NO: 2578864 - RNA, 19 nt, Artificial Sequence
  Description of Artificial Sequence: Synthetic oligonucleotide
  Sense strand starting at position 2170 of SEQ ID NO: 1889107
gguagaucccaauacucuu

SEQ ID NO: 2578865 - RNA, 19 nt, Artificial Sequence
  Description of Artificial Sequence: Synthetic oligonucleotide
  Antisense strand to SEQ ID NO: 2578864
aagaguauugggaucuacc

SEQ ID NO: 2578866 - RNA, 19 nt, Artificial Sequence
  Description of Artificial Sequence: Synthetic oligonucleotide
  Sense strand starting at position 2236 of SEQ ID NO: 1889107
cugacauuggcuuauucca

SEQ ID NO: 2578867 - RNA, 19 nt, Artificial Sequence
  Description of Artificial Sequence: Synthetic oligonucleotide
  Antisense strand to SEQ ID NO: 2578866
uggaauaagccaaugucag

SEQ ID NO: 2578868 - RNA, 19 nt, Artificial Sequence
  Description of Artificial Sequence: Synthetic oligonucleotide
  Sense strand starting at position 2258 of SEQ ID NO: 1889107
accagaugucucuggaaau

SEQ ID NO: 2578869 - RNA, 19 nt, Artificial Sequence
  Description of Artificial Sequence: Synthetic oligonucleotide
  Antisense strand to SEQ ID NO: 2578868
auuuccagagacaucuggu

SEQ ID NO: 2578870 - RNA, 19 nt, Artificial Sequence
  Description of Artificial Sequence: Synthetic oligonucleotide
  Sense strand starting at position 2425 of SEQ ID NO: 1889107
uuauuagauucccuaaggu

SEQ ID NO: 2578871 - RNA, 19 nt, Artificial Sequence
  Description of Artificial Sequence: Synthetic oligonucleotide
  Antisense strand to SEQ ID NO: 2578870
accuuagggaaucuaauaa

SEQ ID NO: 2578872 - RNA, 19 nt, Artificial Sequence
  Description of Artificial Sequence: Synthetic oligonucleotide
  Sense strand starting at position 2584 of SEQ ID NO: 1889107
ccaaguagccgagagacua

SEQ ID NO: 2578873 - RNA, 19 nt, Artificial Sequence
  Description of Artificial Sequence: Synthetic oligonucleotide
  Antisense strand to SEQ ID NO: 2578872
uagucucucggcuacuugg

SEQ ID NO: 2578874 - RNA, 19 nt, Artificial Sequence
  Description of Artificial Sequence: Synthetic oligonucleotide
  Sense strand starting at position 2733 of SEQ ID NO: 1889107
aaauaugcuagguguagga

SEQ ID NO: 2578875 - RNA, 19 nt, Artificial Sequence
  Description of Artificial Sequence: Synthetic oligonucleotide
  Antisense strand to SEQ ID NO: 2578874
uccuacaccuagcauauuu

SEQ ID NO: 2578876 - RNA, 19 nt, Artificial Sequence
  Description of Artificial Sequence: Synthetic oligonucleotide
  Sense strand starting at position 2735 of SEQ ID NO: 1889107
auaugcuagguguaggauu

SEQ ID NO: 2578877 - RNA, 19 nt, Artificial Sequence
  Description of Artificial Sequence: Synthetic oligonucleotide
  Antisense strand to SEQ ID NO: 2578876
aauccuacaccuagcauau

SEQ ID NO: 2578878 - RNA, 19 nt, Artificial Sequence
  Description of Artificial Sequence: Synthetic oligonucleotide
  Sense strand starting at position 2746 of SEQ ID NO: 1889107
guaggauucuuagucgaga

SEQ ID NO: 2578879 - RNA, 19 nt, Artificial Sequence
  Description of Artificial Sequence: Synthetic oligonucleotide
  Antisense strand to SEQ ID NO: 2578878
ucucgacuaagaauccuac

SEQ ID NO: 2578880 - RNA, 19 nt, Artificial Sequence
  Description of Artificial Sequence: Synthetic oligonucleotide
  Sense strand starting at position 2747 of SEQ ID NO: 1889107
uaggauucuuagucgagag

SEQ ID NO: 2578881 - RNA, 19 nt, Artificial Sequence
  Description of Artificial Sequence: Synthetic oligonucleotide
  Antisense strand to SEQ ID NO: 2578880
cucucgacuaagaauccua

SEQ ID NO: 2578882 - RNA, 19 nt, Artificial Sequence
  Description of Artificial Sequence: Synthetic oligonucleotide
  Sense strand starting at position 2749 of SEQ ID NO: 1889107
ggauucuuagucgagagcu

SEQ ID NO: 2578883 - RNA, 19 nt, Artificial Sequence
  Description of Artificial Sequence: Synthetic oligonucleotide
  Antisense strand to SEQ ID NO: 2578882
agcucucgacuaagaaucc

SEQ ID NO: 2578884 - RNA, 19 nt, Artificial Sequence
  Description of Artificial Sequence: Synthetic oligonucleotide
  Sense strand starting at position 3076 of SEQ ID NO: 1889107
guugcucugcacuaagaaa

SEQ ID NO: 2578885 - RNA, 19 nt, Artificial Sequence
  Description of Artificial Sequence: Synthetic oligonucleotide
  Antisense strand to SEQ ID NO: 2578884
uuucuuagugcagagcaac

SEQ ID NO: 2578886 - RNA, 19 nt, Artificial Sequence
  Description of Artificial Sequence: Synthetic oligonucleotide
  Sense strand starting at position 3155 of SEQ ID NO: 1889107
aucauaaaugugcaguuau

SEQ ID NO: 2578887 - RNA, 19 nt, Artificial Sequence
  Description of Artificial Sequence: Synthetic oligonucleotide
  Antisense strand to SEQ ID NO: 2578886
auaacugcacauuuaugau

SEQ ID NO: 2578888 - RNA, 19 nt, Artificial Sequence
  Description of Artificial Sequence: Synthetic oligonucleotide
  Sense strand starting at position 3247 of SEQ ID NO: 1889107
ccaagaagugggcauucua

SEQ ID NO: 2578889 - RNA, 19 nt, Artificial Sequence
  Description of Artificial Sequence: Synthetic oligonucleotide
  Antisense strand to SEQ ID NO: 2578888
uagaaugcccacuucuugg

SEQ ID NO: 2578890 - RNA, 19 nt, Artificial Sequence
  Description of Artificial Sequence: Synthetic oligonucleotide
  Sense strand starting at position 3781 of SEQ ID NO: 1889107
uacuacgugacaggugaaa

SEQ ID NO: 2578891 - RNA, 19 nt, Artificial Sequence
  Description of Artificial Sequence: Synthetic oligonucleotide
  Antisense strand to SEQ ID NO: 2578890
uuucaccugucacguagua

SEQ ID NO: 2578892 - RNA, 19 nt, Artificial Sequence
  Description of Artificial Sequence: Synthetic oligonucleotide
  Sense strand starting at position 3824 of SEQ ID NO: 1889107
gcaagaugccuugacuuag

SEQ ID NO: 2578893 - RNA, 19 nt, Artificial Sequence
  Description of Artificial Sequence: Synthetic oligonucleotide
  Antisense strand to SEQ ID NO: 2578892
cuaagucaaggcaucuugc

SEQ ID NO: 2578894 - RNA, 19 nt, Artificial Sequence
  Description of Artificial Sequence: Synthetic oligonucleotide
  Sense strand starting at position 3887 of SEQ ID NO: 1889107
gagcaugaguuaucuucca

SEQ ID NO: 2578895 - RNA, 19 nt, Artificial Sequence
  Description of Artificial Sequence: Synthetic oligonucleotide
  Antisense strand to SEQ ID NO: 2578894
uggaagauaacucaugcuc

SEQ ID NO: 2578896 - RNA, 19 nt, Artificial Sequence
  Description of Artificial Sequence: Synthetic oligonucleotide
  Sense strand starting at position 69 of SEQ ID NO: 1889108
accauuaugaggugaucag

SEQ ID NO: 2578897 - RNA, 19 nt, Artificial Sequence
  Description of Artificial Sequence: Synthetic oligonucleotide
  Antisense strand to SEQ ID NO: 2578896
cugaucaccucauaauggu

SEQ ID NO: 2578898 - RNA, 19 nt, Artificial Sequence
  Description of Artificial Sequence: Synthetic oligonucleotide
  Sense strand starting at position 143 of SEQ ID NO: 1889108
agaacuaaaucugugcuaa

SEQ ID NO: 2578899 - RNA, 19 nt, Artificial Sequence
  Description of Artificial Sequence: Synthetic oligonucleotide
  Antisense strand to SEQ ID NO: 2578898
uuagcacagauuuaguucu

SEQ ID NO: 2578900 - RNA, 19 nt, Artificial Sequence
  Description of Artificial Sequence: Synthetic oligonucleotide
  Sense strand starting at position 185 of SEQ ID NO: 1889108
ggugcugagaaaugauuga

SEQ ID NO: 2578901 - RNA, 19 nt, Artificial Sequence
  Description of Artificial Sequence: Synthetic oligonucleotide
  Antisense strand to SEQ ID NO: 2578900
ucaaucauuucucagcacc

SEQ ID NO: 2578902 - RNA, 19 nt, Artificial Sequence
  Description of Artificial Sequence: Synthetic oligonucleotide
  Sense strand starting at position 404 of SEQ ID NO: 1889108
gauacagugucagugagau

SEQ ID NO: 2578903 - RNA, 19 nt, Artificial Sequence
  Description of Artificial Sequence: Synthetic oligonucleotide
  Antisense strand to SEQ ID NO: 2578902
aucucacugacacuguauc

SEQ ID NO: 2578904 - RNA, 19 nt, Artificial Sequence
  Description of Artificial Sequence: Synthetic oligonucleotide
  Sense strand starting at position 426 of SEQ ID NO: 1889108
acuccuggugcagagaaau

SEQ ID NO: 2578905 - RNA, 19 nt, Artificial Sequence
  Description of Artificial Sequence: Synthetic oligonucleotide
  Antisense strand to SEQ ID NO: 2578904
auuucucugcaccaggagu

SEQ ID NO: 2578906 - RNA, 19 nt, Artificial Sequence
  Description of Artificial Sequence: Synthetic oligonucleotide
  Sense strand starting at position 436 of SEQ ID NO: 1889108
cagagaaaugcaggcagaa

SEQ ID NO: 2578907 - RNA, 19 nt, Artificial Sequence
  Description of Artificial Sequence: Synthetic oligonucleotide
  Antisense strand to SEQ ID NO: 2578906
uucugccugcauuucucug

SEQ ID NO: 2578908 - RNA, 19 nt, Artificial Sequence
  Description of Artificial Sequence: Synthetic oligonucleotide
  Sense strand starting at position 553 of SEQ ID NO: 1889108
auaagacagugaucugcuu

SEQ ID NO: 2578909 - RNA, 19 nt, Artificial Sequence
  Description of Artificial Sequence: Synthetic oligonucleotide
  Antisense strand to SEQ ID NO: 2578908
aagcagaucacugucuuau

SEQ ID NO: 2578910 - RNA, 19 nt, Artificial Sequence
  Description of Artificial Sequence: Synthetic oligonucleotide
  Sense strand starting at position 757 of SEQ ID NO: 1889108
auggguauuguccagauuc

SEQ ID NO: 2578911 - RNA, 19 nt, Artificial Sequence
  Description of Artificial Sequence: Synthetic oligonucleotide
  Antisense strand to SEQ ID NO: 2578910
gaaucuggacaauacccau

SEQ ID NO: 2578912 - RNA, 19 nt, Artificial Sequence
  Description of Artificial Sequence: Synthetic oligonucleotide
  Sense strand starting at position 759 of SEQ ID NO: 1889108
ggguauuguccagauucag

SEQ ID NO: 2578913 - RNA, 19 nt, Artificial Sequence
  Description of Artificial Sequence: Synthetic oligonucleotide
  Antisense strand to SEQ ID NO: 2578912
cugaaucuggacaauaccc

SEQ ID NO: 2578914 - RNA, 19 nt, Artificial Sequence
  Description of Artificial Sequence: Synthetic oligonucleotide
  Sense strand starting at position 782 of SEQ ID NO: 1889108
gacugagagccugaguguu

SEQ ID NO: 2578915 - RNA, 19 nt, Artificial Sequence
  Description of Artificial Sequence: Synthetic oligonucleotide
  Antisense strand to SEQ ID NO: 2578914
aacacucaggcucucaguc

SEQ ID NO: 2578916 - RNA, 19 nt, Artificial Sequence
  Description of Artificial Sequence: Synthetic oligonucleotide
  Sense strand starting at position 881 of SEQ ID NO: 1889108
gaacuugagggaugcagua

SEQ ID NO: 2578917 - RNA, 19 nt, Artificial Sequence
  Description of Artificial Sequence: Synthetic oligonucleotide
  Antisense strand to SEQ ID NO: 2578916
uacugcaucccucaaguuc

SEQ ID NO: 2578918 - RNA, 19 nt, Artificial Sequence
  Description of Artificial Sequence: Synthetic oligonucleotide
  Sense strand starting at position 1145 of SEQ ID NO: 1889108
gcaaauauagaauguaaag

SEQ ID NO: 2578919 - RNA, 19 nt, Artificial Sequence
  Description of Artificial Sequence: Synthetic oligonucleotide
  Antisense strand to SEQ ID NO: 2578918
cuuuacauucuauauuugc

SEQ ID NO: 2578920 - RNA, 19 nt, Artificial Sequence
  Description of Artificial Sequence: Synthetic oligonucleotide
  Sense strand starting at position 1187 of SEQ ID NO: 1889108
gagaguucucacuagagcu

SEQ ID NO: 2578921 - RNA, 19 nt, Artificial Sequence
  Description of Artificial Sequence: Synthetic oligonucleotide
  Antisense strand to SEQ ID NO: 2578920
agcucuagugagaacucuc

SEQ ID NO: 2578922 - RNA, 19 nt, Artificial Sequence
  Description of Artificial Sequence: Synthetic oligonucleotide
  Sense strand starting at position 1439 of SEQ ID NO: 1889108
gggacaugggucugauucu

SEQ ID NO: 2578923 - RNA, 19 nt, Artificial Sequence
  Description of Artificial Sequence: Synthetic oligonucleotide
  Antisense strand to SEQ ID NO: 2578922
agaaucagacccauguccc

SEQ ID NO: 2578924 - RNA, 19 nt, Artificial Sequence
  Description of Artificial Sequence: Synthetic oligonucleotide
  Sense strand starting at position 1460 of SEQ ID NO: 1889108
auauaaugagaaggcucua

SEQ ID NO: 2578925 - RNA, 19 nt, Artificial Sequence
  Description of Artificial Sequence: Synthetic oligonucleotide
  Antisense strand to SEQ ID NO: 2578924
uagagccuucucauuauau

SEQ ID NO: 2578926 - RNA, 19 nt, Artificial Sequence
  Description of Artificial Sequence: Synthetic oligonucleotide
  Sense strand starting at position 1530 of SEQ ID NO: 1889108
uucuuacuaguguagaaug

SEQ ID NO: 2578927 - RNA, 19 nt, Artificial Sequence
  Description of Artificial Sequence: Synthetic oligonucleotide
  Antisense strand to SEQ ID NO: 2578926
cauucuacacuaguaagaa

SEQ ID NO: 2578928 - RNA, 19 nt, Artificial Sequence
  Description of Artificial Sequence: Synthetic oligonucleotide
  Sense strand starting at position 1567 of SEQ ID NO: 1889108
ggaagcgacuuuccaauau

SEQ ID NO: 2578929 - RNA, 19 nt, Artificial Sequence
  Description of Artificial Sequence: Synthetic oligonucleotide
  Antisense strand to SEQ ID NO: 2578928
auauuggaaagucgcuucc

SEQ ID NO: 2578930 - RNA, 19 nt, Artificial Sequence
  Description of Artificial Sequence: Synthetic oligonucleotide
  Sense strand starting at position 1571 of SEQ ID NO: 1889108
gcgacuuuccaauaucaca

SEQ ID NO: 2578931 - RNA, 19 nt, Artificial Sequence
  Description of Artificial Sequence: Synthetic oligonucleotide
  Antisense strand to SEQ ID NO: 2578930
ugugauauuggaaagucgc

SEQ ID NO: 2578932 - RNA, 19 nt, Artificial Sequence
  Description of Artificial Sequence: Synthetic oligonucleotide
  Sense strand starting at position 1579 of SEQ ID NO: 1889108
ccaauaucacagugcugga

SEQ ID NO: 2578933 - RNA, 19 nt, Artificial Sequence
  Description of Artificial Sequence: Synthetic oligonucleotide
  Antisense strand to SEQ ID NO: 2578932
uccagcacugugauauugg

SEQ ID NO: 2578934 - RNA, 19 nt, Artificial Sequence
  Description of Artificial Sequence: Synthetic oligonucleotide
  Sense strand starting at position 1668 of SEQ ID NO: 1889108
gugcauugucuacauggga

SEQ ID NO: 2578935 - RNA, 19 nt, Artificial Sequence
  Description of Artificial Sequence: Synthetic oligonucleotide
  Antisense strand to SEQ ID NO: 2578934
ucccauguagacaaugcac

SEQ ID NO: 2578936 - RNA, 19 nt, Artificial Sequence
  Description of Artificial Sequence: Synthetic oligonucleotide
  Sense strand starting at position 1728 of SEQ ID NO: 1889108
cgaugaguucccuagggag

SEQ ID NO: 2578937 - RNA, 19 nt, Artificial Sequence
  Description of Artificial Sequence: Synthetic oligonucleotide
  Antisense strand to SEQ ID NO: 2578936
cucccuagggaacucaucg

SEQ ID NO: 2578938 - RNA, 19 nt, Artificial Sequence
  Description of Artificial Sequence: Synthetic oligonucleotide
  Sense strand starting at position 1730 of SEQ ID NO: 1889108
augaguucccuagggagau

SEQ ID NO: 2578939 - RNA, 19 nt, Artificial Sequence
  Description of Artificial Sequence: Synthetic oligonucleotide
  Antisense strand to SEQ ID NO: 2578938
aucucccuagggaacucau

SEQ ID NO: 2578940 - RNA, 19 nt, Artificial Sequence
  Description of Artificial Sequence: Synthetic oligonucleotide
  Sense strand starting at position 1740 of SEQ ID NO: 1889108
uagggagaugcuggcauau

SEQ ID NO: 2578941 - RNA, 19 nt, Artificial Sequence
  Description of Artificial Sequence: Synthetic oligonucleotide
  Antisense strand to SEQ ID NO: 2578940
auaugccagcaucucccua

SEQ ID NO: 2578942 - RNA, 19 nt, Artificial Sequence
  Description of Artificial Sequence: Synthetic oligonucleotide
  Sense strand starting at position 1832 of SEQ ID NO: 1889108
cuagguucuuacccagauc

SEQ ID NO: 2578943 - RNA, 19 nt, Artificial Sequence
  Description of Artificial Sequence: Synthetic oligonucleotide
  Antisense strand to SEQ ID NO: 2578942
gaucuggguaagaaccuag

SEQ ID NO: 2578944 - RNA, 19 nt, Artificial Sequence
  Description of Artificial Sequence: Synthetic oligonucleotide
  Sense strand starting at position 1835 of SEQ ID NO: 1889108
gguucuuacccagaucuau

SEQ ID NO: 2578945 - RNA, 19 nt, Artificial Sequence
  Description of Artificial Sequence: Synthetic oligonucleotide
  Antisense strand to SEQ ID NO: 2578944
auagaucuggguaagaacc

SEQ ID NO: 2578946 - RNA, 19 nt, Artificial Sequence
  Description of Artificial Sequence: Synthetic oligonucleotide
  Sense strand starting at position 2145 of SEQ ID NO: 1889108
uguuuaacagagcacaaua

SEQ ID NO: 2578947 - RNA, 19 nt, Artificial Sequence
  Description of Artificial Sequence: Synthetic oligonucleotide
  Antisense strand to SEQ ID NO: 2578946
uauugugcucuguuaaaca

SEQ ID NO: 2578948 - RNA, 19 nt, Artificial Sequence
  Description of Artificial Sequence: Synthetic oligonucleotide
  Sense strand starting at position 2171 of SEQ ID NO: 1889108
gguagaucccaauacucuu

SEQ ID NO: 2578949 - RNA, 19 nt, Artificial Sequence
  Description of Artificial Sequence: Synthetic oligonucleotide
  Antisense strand to SEQ ID NO: 2578948
aagaguauugggaucuacc

SEQ ID NO: 2578950 - RNA, 19 nt, Artificial Sequence
  Description of Artificial Sequence: Synthetic oligonucleotide
  Sense strand starting at position 2237 of SEQ ID NO: 1889108
cugacauuggcuuauucca

SEQ ID NO: 2578951 - RNA, 19 nt, Artificial Sequence
  Description of Artificial Sequence: Synthetic oligonucleotide
  Antisense strand to SEQ ID NO: 2578950
uggaauaagccaaugucag

SEQ ID NO: 2578952 - RNA, 19 nt, Artificial Sequence
  Description of Artificial Sequence: Synthetic oligonucleotide
  Sense strand starting at position 2259 of SEQ ID NO: 1889108
accagaugucucuggaaau

SEQ ID NO: 2578953 - RNA, 19 nt, Artificial Sequence
  Description of Artificial Sequence: Synthetic oligonucleotide
  Antisense strand to SEQ ID NO: 2578952
auuuccagagacaucuggu

SEQ ID NO: 2578954 - RNA, 19 nt, Artificial Sequence
  Description of Artificial Sequence: Synthetic oligonucleotide
  Sense strand starting at position 2426 of SEQ ID NO: 1889108
uuauuagauucccuaaggu

SEQ ID NO: 2578955 - RNA, 19 nt, Artificial Sequence
  Description of Artificial Sequence: Synthetic oligonucleotide
  Antisense strand to SEQ ID NO: 2578954
accuuagggaaucuaauaa

SEQ ID NO: 2578956 - RNA, 19 nt, Artificial Sequence
  Description of Artificial Sequence: Synthetic oligonucleotide
  Sense strand starting at position 2585 of SEQ ID NO: 1889108
ccaaguagccgagagacua

SEQ ID NO: 2578957 - RNA, 19 nt, Artificial Sequence
  Description of Artificial Sequence: Synthetic oligonucleotide
  Antisense strand to SEQ ID NO: 2578956
uagucucucggcuacuugg

SEQ ID NO: 2578958 - RNA, 19 nt, Artificial Sequence
  Description of Artificial Sequence: Synthetic oligonucleotide
  Sense strand starting at position 2734 of SEQ ID NO: 1889108
aaauaugcuagguguagga

SEQ ID NO: 2578959 - RNA, 19 nt, Artificial Sequence
  Description of Artificial Sequence: Synthetic oligonucleotide
  Antisense strand to SEQ ID NO: 2578958
uccuacaccuagcauauuu

SEQ ID NO: 2578960 - RNA, 19 nt, Artificial Sequence
  Description of Artificial Sequence: Synthetic oligonucleotide
  Sense strand starting at position 2736 of SEQ ID NO: 1889108
auaugcuagguguaggauu

SEQ ID NO: 2578961 - RNA, 19 nt, Artificial Sequence
  Description of Artificial Sequence: Synthetic oligonucleotide
  Antisense strand to SEQ ID NO: 2578960
aauccuacaccuagcauau

SEQ ID NO: 2578962 - RNA, 19 nt, Artificial Sequence
  Description of Artificial Sequence: Synthetic oligonucleotide
  Sense strand starting at position 2748 of SEQ ID NO: 1889108
uaggauucuuagucgagag

SEQ ID NO: 2578963 - RNA, 19 nt, Artificial Sequence
  Description of Artificial Sequence: Synthetic oligonucleotide
  Antisense strand to SEQ ID NO: 2578962
cucucgacuaagaauccua

SEQ ID NO: 2578964 - RNA, 19 nt, Artificial Sequence
  Description of Artificial Sequence: Synthetic oligonucleotide
  Sense strand starting at position 2750 of SEQ ID NO: 1889108
ggauucuuagucgagagcu

SEQ ID NO: 2578965 - RNA, 19 nt, Artificial Sequence
  Description of Artificial Sequence: Synthetic oligonucleotide
  Antisense strand to SEQ ID NO: 2578964
agcucucgacuaagaaucc

SEQ ID NO: 2578966 - RNA, 19 nt, Artificial Sequence
  Description of Artificial Sequence: Synthetic oligonucleotide
  Sense strand starting at position 3077 of SEQ ID NO: 1889108
guugcucugcacuaagaaa

SEQ ID NO: 2578967 - RNA, 19 nt, Artificial Sequence
  Description of Artificial Sequence: Synthetic oligonucleotide
  Antisense strand to SEQ ID NO: 2578966
uuucuuagugcagagcaac

SEQ ID NO: 2578968 - RNA, 19 nt, Artificial Sequence
  Description of Artificial Sequence: Synthetic oligonucleotide
  Sense strand starting at position 3156 of SEQ ID NO: 1889108
aucauaaaugugcaguuau

SEQ ID NO: 2578969 - RNA, 19 nt, Artificial Sequence
  Description of Artificial Sequence: Synthetic oligonucleotide
  Antisense strand to SEQ ID NO: 2578968
auaacugcacauuuaugau

SEQ ID NO: 2578970 - RNA, 19 nt, Artificial Sequence
  Description of Artificial Sequence: Synthetic oligonucleotide
  Sense strand starting at position 3661 of SEQ ID NO: 1889108
acacaaguuccuggaaauu

SEQ ID NO: 2578971 - RNA, 19 nt, Artificial Sequence
  Description of Artificial Sequence: Synthetic oligonucleotide
  Antisense strand to SEQ ID NO: 2578970
aauuuccaggaacuugugu

SEQ ID NO: 2578972 - RNA, 19 nt, Artificial Sequence
  Description of Artificial Sequence: Synthetic oligonucleotide
  Sense strand starting at position 3781 of SEQ ID NO: 1889108
uacuacgugacaggugaaa

SEQ ID NO: 2578973 - RNA, 19 nt, Artificial Sequence
  Description of Artificial Sequence: Synthetic oligonucleotide
  Antisense strand to SEQ ID NO: 2578972
uuucaccugucacguagua

SEQ ID NO: 2578974 - RNA, 19 nt, Artificial Sequence
  Description of Artificial Sequence: Synthetic oligonucleotide
  Sense strand starting at position 3824 of SEQ ID NO: 1889108
gcaagaugccuugacuuag

SEQ ID NO: 2578975 - RNA, 19 nt, Artificial Sequence
  Description of Artificial Sequence: Synthetic oligonucleotide
  Antisense strand to SEQ ID NO: 2578974
cuaagucaaggcaucuugc

SEQ ID NO: 2578976 - RNA, 19 nt, Artificial Sequence
  Description of Artificial Sequence: Synthetic oligonucleotide
  Sense strand starting at position 142 of SEQ ID NO: 1889109
agaacuaaaucugugcuaa

SEQ ID NO: 2578977 - RNA, 19 nt, Artificial Sequence
  Description of Artificial Sequence: Synthetic oligonucleotide
  Antisense strand to SEQ ID NO: 2578976
uuagcacagauuuaguucu

SEQ ID NO: 2578978 - RNA, 19 nt, Artificial Sequence
  Description of Artificial Sequence: Synthetic oligonucleotide
  Sense strand starting at position 403 of SEQ ID NO: 1889109
gauacagugucagugagau

SEQ ID NO: 2578979 - RNA, 19 nt, Artificial Sequence
  Description of Artificial Sequence: Synthetic oligonucleotide
  Antisense strand to SEQ ID NO: 2578978
aucucacugacacuguauc

SEQ ID NO: 2578980 - RNA, 19 nt, Artificial Sequence
  Description of Artificial Sequence: Synthetic oligonucleotide
  Sense strand starting at position 425 of SEQ ID NO: 1889109
acuccuggugcagagaaau

SEQ ID NO: 2578981 - RNA, 19 nt, Artificial Sequence
  Description of Artificial Sequence: Synthetic oligonucleotide
  Antisense strand to SEQ ID NO: 2578980
auuucucugcaccaggagu

SEQ ID NO: 2578982 - RNA, 19 nt, Artificial Sequence
  Description of Artificial Sequence: Synthetic oligonucleotide
  Sense strand starting at position 435 of SEQ ID NO: 1889109
cagagaaaugcaggcagaa

SEQ ID NO: 2578983 - RNA, 19 nt, Artificial Sequence
  Description of Artificial Sequence: Synthetic oligonucleotide
  Antisense strand to SEQ ID NO: 2578982
uucugccugcauuucucug

SEQ ID NO: 2578984 - RNA, 19 nt, Artificial Sequence
  Description of Artificial Sequence: Synthetic oligonucleotide
  Sense strand starting at position 437 of SEQ ID NO: 1889109
gagaaaugcaggcagaagu

SEQ ID NO: 2578985 - RNA, 19 nt, Artificial Sequence
  Description of Artificial Sequence: Synthetic oligonucleotide
  Antisense strand to SEQ ID NO: 2578984
acuucugccugcauuucuc

SEQ ID NO: 2578986 - RNA, 19 nt, Artificial Sequence
  Description of Artificial Sequence: Synthetic oligonucleotide
  Sense strand starting at position 552 of SEQ ID NO: 1889109
auaagacagugaucugcuu

SEQ ID NO: 2578987 - RNA, 19 nt, Artificial Sequence
  Description of Artificial Sequence: Synthetic oligonucleotide
  Antisense strand to SEQ ID NO: 2578986
aagcagaucacugucuuau

SEQ ID NO: 2578988 - RNA, 19 nt, Artificial Sequence
  Description of Artificial Sequence: Synthetic oligonucleotide
  Sense strand starting at position 756 of SEQ ID NO: 1889109
auggguauuguccagauuc

SEQ ID NO: 2578989 - RNA, 19 nt, Artificial Sequence
  Description of Artificial Sequence: Synthetic oligonucleotide
  Antisense strand to SEQ ID NO: 2578988
gaaucuggacaauacccau

SEQ ID NO: 2578990 - RNA, 19 nt, Artificial Sequence
  Description of Artificial Sequence: Synthetic oligonucleotide
  Sense strand starting at position 758 of SEQ ID NO: 1889109
ggguauuguccagauucag

SEQ ID NO: 2578991 - RNA, 19 nt, Artificial Sequence
  Description of Artificial Sequence: Synthetic oligonucleotide
  Antisense strand to SEQ ID NO: 2578990
cugaaucuggacaauaccc

SEQ ID NO: 2578992 - RNA, 19 nt, Artificial Sequence
  Description of Artificial Sequence: Synthetic oligonucleotide
  Sense strand starting at position 781 of SEQ ID NO: 1889109
gacugagagccugaguguu

SEQ ID NO: 2578993 - RNA, 19 nt, Artificial Sequence
  Description of Artificial Sequence: Synthetic oligonucleotide
  Antisense strand to SEQ ID NO: 2578992
aacacucaggcucucaguc

SEQ ID NO: 2578994 - RNA, 19 nt, Artificial Sequence
  Description of Artificial Sequence: Synthetic oligonucleotide
  Sense strand starting at position 880 of SEQ ID NO: 1889109
gaacuugagggaugcagua

SEQ ID NO: 2578995 - RNA, 19 nt, Artificial Sequence
  Description of Artificial Sequence: Synthetic oligonucleotide
  Antisense strand to SEQ ID NO: 2578994
uacugcaucccucaaguuc

SEQ ID NO: 2578996 - RNA, 19 nt, Artificial Sequence
  Description of Artificial Sequence: Synthetic oligonucleotide
  Sense strand starting at position 1144 of SEQ ID NO: 1889109
gcaaauauagaauguaaag

SEQ ID NO: 2578997 - RNA, 19 nt, Artificial Sequence
  Description of Artificial Sequence: Synthetic oligonucleotide
  Antisense strand to SEQ ID NO: 2578996
cuuuacauucuauauuugc

SEQ ID NO: 2578998 - RNA, 19 nt, Artificial Sequence
  Description of Artificial Sequence: Synthetic oligonucleotide
  Sense strand starting at position 1186 of SEQ ID NO: 1889109
gagaguucucacuagagcu

SEQ ID NO: 2578999 - RNA, 19 nt, Artificial Sequence
  Description of Artificial Sequence: Synthetic oligonucleotide
  Antisense strand to SEQ ID NO: 2578998
agcucuagugagaacucuc

SEQ ID NO: 2579000 - RNA, 19 nt, Artificial Sequence
  Description of Artificial Sequence: Synthetic oligonucleotide
  Sense strand starting at position 1438 of SEQ ID NO: 1889109
gggacaugggucugauucu

SEQ ID NO: 2579001 - RNA, 19 nt, Artificial Sequence
  Description of Artificial Sequence: Synthetic oligonucleotide
  Antisense strand to SEQ ID NO: 2579000
agaaucagacccauguccc

SEQ ID NO: 2579002 - RNA, 19 nt, Artificial Sequence
  Description of Artificial Sequence: Synthetic oligonucleotide
  Sense strand starting at position 1459 of SEQ ID NO: 1889109
auauaaugagaaggcucua

SEQ ID NO: 2579003 - RNA, 19 nt, Artificial Sequence
  Description of Artificial Sequence: Synthetic oligonucleotide
  Antisense strand to SEQ ID NO: 2579002
uagagccuucucauuauau

SEQ ID NO: 2579004 - RNA, 19 nt, Artificial Sequence
  Description of Artificial Sequence: Synthetic oligonucleotide
  Sense strand starting at position 1529 of SEQ ID NO: 1889109
uucuuacuaguguagaaug

SEQ ID NO: 2579005 - RNA, 19 nt, Artificial Sequence
  Description of Artificial Sequence: Synthetic oligonucleotide
  Antisense strand to SEQ ID NO: 2579004
cauucuacacuaguaagaa

SEQ ID NO: 2579006 - RNA, 19 nt, Artificial Sequence
  Description of Artificial Sequence: Synthetic oligonucleotide
  Sense strand starting at position 1578 of SEQ ID NO: 1889109
ccaauaucacagugcugga

SEQ ID NO: 2579007 - RNA, 19 nt, Artificial Sequence
  Description of Artificial Sequence: Synthetic oligonucleotide
  Antisense strand to SEQ ID NO: 2579006
uccagcacugugauauugg

SEQ ID NO: 2579008 - RNA, 19 nt, Artificial Sequence
  Description of Artificial Sequence: Synthetic oligonucleotide
  Sense strand starting at position 1667 of SEQ ID NO: 1889109
gugcauugucuacauggga

SEQ ID NO: 2579009 - RNA, 19 nt, Artificial Sequence
  Description of Artificial Sequence: Synthetic oligonucleotide
  Antisense strand to SEQ ID NO: 2579008
ucccauguagacaaugcac

SEQ ID NO: 2579010 - RNA, 19 nt, Artificial Sequence
  Description of Artificial Sequence: Synthetic oligonucleotide
  Sense strand starting at position 1727 of SEQ ID NO: 1889109
cgaugaguucccuagggag

SEQ ID NO: 2579011 - RNA, 19 nt, Artificial Sequence
  Description of Artificial Sequence: Synthetic oligonucleotide
  Antisense strand to SEQ ID NO: 2579010
cucccuagggaacucaucg

SEQ ID NO: 2579012 - RNA, 19 nt, Artificial Sequence
  Description of Artificial Sequence: Synthetic oligonucleotide
  Sense strand starting at position 1729 of SEQ ID NO: 1889109
augaguucccuagggagau

SEQ ID NO: 2579013 - RNA, 19 nt, Artificial Sequence
  Description of Artificial Sequence: Synthetic oligonucleotide
  Antisense strand to SEQ ID NO: 2579012
aucucccuagggaacucau

SEQ ID NO: 2579014 - RNA, 19 nt, Artificial Sequence
  Description of Artificial Sequence: Synthetic oligonucleotide
  Sense strand starting at position 1739 of SEQ ID NO: 1889109
uagggagaugcuggcauau

SEQ ID NO: 2579015 - RNA, 19 nt, Artificial Sequence
  Description of Artificial Sequence: Synthetic oligonucleotide
  Antisense strand to SEQ ID NO: 2579014
auaugccagcaucucccua

SEQ ID NO: 2579016 - RNA, 19 nt, Artificial Sequence
  Description of Artificial Sequence: Synthetic oligonucleotide
  Sense strand starting at position 1831 of SEQ ID NO: 1889109
cuagguucuuacccagauc

SEQ ID NO: 2579017 - RNA, 19 nt, Artificial Sequence
  Description of Artificial Sequence: Synthetic oligonucleotide
  Antisense strand to SEQ ID NO: 2579016
gaucuggguaagaaccuag

SEQ ID NO: 2579018 - RNA, 19 nt, Artificial Sequence
  Description of Artificial Sequence: Synthetic oligonucleotide
  Sense strand starting at position 1834 of SEQ ID NO: 1889109
gguucuuacccagaucuau

SEQ ID NO: 2579019 - RNA, 19 nt, Artificial Sequence
  Description of Artificial Sequence: Synthetic oligonucleotide
  Antisense strand to SEQ ID NO: 2579018
auagaucuggguaagaacc

SEQ ID NO: 2579020 - RNA, 19 nt, Artificial Sequence
  Description of Artificial Sequence: Synthetic oligonucleotide
  Sense strand starting at position 1937 of SEQ ID NO: 1889109
agaguugacacgcagggau

SEQ ID NO: 2579021 - RNA, 19 nt, Artificial Sequence
  Description of Artificial Sequence: Synthetic oligonucleotide
  Antisense strand to SEQ ID NO: 2579020
aucccugcgugucaacucu

SEQ ID NO: 2579022 - RNA, 19 nt, Artificial Sequence
  Description of Artificial Sequence: Synthetic oligonucleotide
  Sense strand starting at position 2144 of SEQ ID NO: 1889109
uguuuaacagagcacaaua

SEQ ID NO: 2579023 - RNA, 19 nt, Artificial Sequence
  Description of Artificial Sequence: Synthetic oligonucleotide
  Antisense strand to SEQ ID NO: 2579022
uauugugcucuguuaaaca

SEQ ID NO: 2579024 - RNA, 19 nt, Artificial Sequence
  Description of Artificial Sequence: Synthetic oligonucleotide
  Sense strand starting at position 2170 of SEQ ID NO: 1889109
gguagaucccaauacucuu

SEQ ID NO: 2579025 - RNA, 19 nt, Artificial Sequence
  Description of Artificial Sequence: Synthetic oligonucleotide
  Antisense strand to SEQ ID NO: 2579024
aagaguauugggaucuacc

SEQ ID NO: 2579026 - RNA, 19 nt, Artificial Sequence
  Description of Artificial Sequence: Synthetic oligonucleotide
  Sense strand starting at position 2236 of SEQ ID NO: 1889109
cugacauuggcuuauucca

SEQ ID NO: 2579027 - RNA, 19 nt, Artificial Sequence
  Description of Artificial Sequence: Synthetic oligonucleotide
  Antisense strand to SEQ ID NO: 2579026
uggaauaagccaaugucag

SEQ ID NO: 2579028 - RNA, 19 nt, Artificial Sequence
  Description of Artificial Sequence: Synthetic oligonucleotide
  Sense strand starting at position 2258 of SEQ ID NO: 1889109
accagaugucucuggaaau

SEQ ID NO: 2579029 - RNA, 19 nt, Artificial Sequence
  Description of Artificial Sequence: Synthetic oligonucleotide
  Antisense strand to SEQ ID NO: 2579028
auuuccagagacaucuggu

SEQ ID NO: 2579030 - RNA, 19 nt, Artificial Sequence
  Description of Artificial Sequence: Synthetic oligonucleotide
  Sense strand starting at position 2425 of SEQ ID NO: 1889109
uuauuagauucccuaaggu

SEQ ID NO: 2579031 - RNA, 19 nt, Artificial Sequence
  Description of Artificial Sequence: Synthetic oligonucleotide
  Antisense strand to SEQ ID NO: 2579030
accuuagggaaucuaauaa

SEQ ID NO: 2579032 - RNA, 19 nt, Artificial Sequence
  Description of Artificial Sequence: Synthetic oligonucleotide
  Sense strand starting at position 2584 of SEQ ID NO: 1889109
ccaaguagccgagagacua

SEQ ID NO: 2579033 - RNA, 19 nt, Artificial Sequence
  Description of Artificial Sequence: Synthetic oligonucleotide
  Antisense strand to SEQ ID NO: 2579032
uagucucucggcuacuugg

SEQ ID NO: 2579034 - RNA, 19 nt, Artificial Sequence
  Description of Artificial Sequence: Synthetic oligonucleotide
  Sense strand starting at position 2733 of SEQ ID NO: 1889109
aaauaugcuagguguagga

SEQ ID NO: 2579035 - RNA, 19 nt, Artificial Sequence
  Description of Artificial Sequence: Synthetic oligonucleotide
  Antisense strand to SEQ ID NO: 2579034
uccuacaccuagcauauuu

SEQ ID NO: 2579036 - RNA, 19 nt, Artificial Sequence
  Description of Artificial Sequence: Synthetic oligonucleotide
  Sense strand starting at position 2735 of SEQ ID NO: 1889109
auaugcuagguguaggauu

SEQ ID NO: 2579037 - RNA, 19 nt, Artificial Sequence
  Description of Artificial Sequence: Synthetic oligonucleotide
  Antisense strand to SEQ ID NO: 2579036
aauccuacaccuagcauau

SEQ ID NO: 2579038 - RNA, 19 nt, Artificial Sequence
  Description of Artificial Sequence: Synthetic oligonucleotide
  Sense strand starting at position 2746 of SEQ ID NO: 1889109
guaggauucuuagucgaga

SEQ ID NO: 2579039 - RNA, 19 nt, Artificial Sequence
  Description of Artificial Sequence: Synthetic oligonucleotide
  Antisense strand to SEQ ID NO: 2579038
ucucgacuaagaauccuac

SEQ ID NO: 2579040 - RNA, 19 nt, Artificial Sequence
  Description of Artificial Sequence: Synthetic oligonucleotide
  Sense strand starting at position 2747 of SEQ ID NO: 1889109
uaggauucuuagucgagag

SEQ ID NO: 2579041 - RNA, 19 nt, Artificial Sequence
  Description of Artificial Sequence: Synthetic oligonucleotide
  Antisense strand to SEQ ID NO: 2579040
cucucgacuaagaauccua

SEQ ID NO: 2579042 - RNA, 19 nt, Artificial Sequence
  Description of Artificial Sequence: Synthetic oligonucleotide
  Sense strand starting at position 2749 of SEQ ID NO: 1889109
ggauucuuagucgagagcu

SEQ ID NO: 2579043 - RNA, 19 nt, Artificial Sequence
  Description of Artificial Sequence: Synthetic oligonucleotide
  Antisense strand to SEQ ID NO: 2579042
agcucucgacuaagaaucc

SEQ ID NO: 2579044 - RNA, 19 nt, Artificial Sequence
  Description of Artificial Sequence: Synthetic oligonucleotide
  Sense strand starting at position 3076 of SEQ ID NO: 1889109
guugcucugcacuaagaaa

SEQ ID NO: 2579045 - RNA, 19 nt, Artificial Sequence
  Description of Artificial Sequence: Synthetic oligonucleotide
  Antisense strand to SEQ ID NO: 2579044
uuucuuagugcagagcaac

SEQ ID NO: 2579046 - RNA, 19 nt, Artificial Sequence
  Description of Artificial Sequence: Synthetic oligonucleotide
  Sense strand starting at position 3155 of SEQ ID NO: 1889109
aucauaaaugugcaguuau

SEQ ID NO: 2579047 - RNA, 19 nt, Artificial Sequence
  Description of Artificial Sequence: Synthetic oligonucleotide
  Antisense strand to SEQ ID NO: 2579046
auaacugcacauuuaugau

SEQ ID NO: 2579048 - RNA, 19 nt, Artificial Sequence
  Description of Artificial Sequence: Synthetic oligonucleotide
  Sense strand starting at position 3247 of SEQ ID NO: 1889109
ccaagaagugggcauucua

SEQ ID NO: 2579049 - RNA, 19 nt, Artificial Sequence
  Description of Artificial Sequence: Synthetic oligonucleotide
  Antisense strand to SEQ ID NO: 2579048
uagaaugcccacuucuugg

SEQ ID NO: 2579050 - RNA, 19 nt, Artificial Sequence
  Description of Artificial Sequence: Synthetic oligonucleotide
  Sense strand starting at position 3781 of SEQ ID NO: 1889109
uacuacgugacaggugaaa

SEQ ID NO: 2579051 - RNA, 19 nt, Artificial Sequence
  Description of Artificial Sequence: Synthetic oligonucleotide
  Antisense strand to SEQ ID NO: 2579050
uuucaccugucacguagua

SEQ ID NO: 2579052 - RNA, 19 nt, Artificial Sequence
  Description of Artificial Sequence: Synthetic oligonucleotide
  Sense strand starting at position 3824 of SEQ ID NO: 1889109
gcaagaugccuugacuuag

SEQ ID NO: 2579053 - RNA, 19 nt, Artificial Sequence
  Description of Artificial Sequence: Synthetic oligonucleotide
  Antisense strand to SEQ ID NO: 2579052
cuaagucaaggcaucuugc

SEQ ID NO: 2579054 - RNA, 19 nt, Artificial Sequence
  Description of Artificial Sequence: Synthetic oligonucleotide
  Sense strand starting at position 3887 of SEQ ID NO: 1889109
gagcaugaguuaucuucca

SEQ ID NO: 2579055 - RNA, 19 nt, Artificial Sequence
  Description of Artificial Sequence: Synthetic oligonucleotide
  Antisense strand to SEQ ID NO: 2579054
uggaagauaacucaugcuc

SEQ ID NO: 2579056 - RNA, 19 nt, Artificial Sequence
  Description of Artificial Sequence: Synthetic oligonucleotide
  Sense strand starting at position 779 of SEQ ID NO: 1889110
ccucuuuacugauagggac

SEQ ID NO: 2579057 - RNA, 19 nt, Artificial Sequence
  Description of Artificial Sequence: Synthetic oligonucleotide
  Antisense strand to SEQ ID NO: 2579056
gucccuaucaguaaagagg

SEQ ID NO: 2579058 - RNA, 19 nt, Artificial Sequence
  Description of Artificial Sequence: Synthetic oligonucleotide
  Sense strand starting at position 1133 of SEQ ID NO: 1889110
ucugccaccuugugauuga

SEQ ID NO: 2579059 - RNA, 19 nt, Artificial Sequence
  Description of Artificial Sequence: Synthetic oligonucleotide
  Antisense strand to SEQ ID NO: 2579058
ucaaucacaagguggcaga

SEQ ID NO: 2579060 - RNA, 19 nt, Artificial Sequence
  Description of Artificial Sequence: Synthetic oligonucleotide
  Sense strand starting at position 1136 of SEQ ID NO: 1889110
gccaccuugugauugagaa

SEQ ID NO: 2579061 - RNA, 19 nt, Artificial Sequence
  Description of Artificial Sequence: Synthetic oligonucleotide
  Antisense strand to SEQ ID NO: 2579060
uucucaaucacaagguggc

SEQ ID NO: 2579062 - RNA, 19 nt, Artificial Sequence
  Description of Artificial Sequence: Synthetic oligonucleotide
  Sense strand starting at position 1137 of SEQ ID NO: 1889110
ccaccuugugauugagaaa

SEQ ID NO: 2579063 - RNA, 19 nt, Artificial Sequence
  Description of Artificial Sequence: Synthetic oligonucleotide
  Antisense strand to SEQ ID NO: 2579062
uuucucaaucacaaggugg

SEQ ID NO: 2579064 - RNA, 19 nt, Artificial Sequence
  Description of Artificial Sequence: Synthetic oligonucleotide
  Sense strand starting at position 1140 of SEQ ID NO: 1889110
ccuugugauugagaaaggu

SEQ ID NO: 2579065 - RNA, 19 nt, Artificial Sequence
  Description of Artificial Sequence: Synthetic oligonucleotide
  Antisense strand to SEQ ID NO: 2579064
accuuucucaaucacaagg

SEQ ID NO: 2579066 - RNA, 19 nt, Artificial Sequence
  Description of Artificial Sequence: Synthetic oligonucleotide
  Sense strand starting at position 1144 of SEQ ID NO: 1889110
gugauugagaaaggugcau

SEQ ID NO: 2579067 - RNA, 19 nt, Artificial Sequence
  Description of Artificial Sequence: Synthetic oligonucleotide
  Antisense strand to SEQ ID NO: 2579066
augcaccuuucucaaucac

SEQ ID NO: 2579068 - RNA, 19 nt, Artificial Sequence
  Description of Artificial Sequence: Synthetic oligonucleotide
  Sense strand starting at position 1267 of SEQ ID NO: 1889110
gccuuuaaaucucagagcu

SEQ ID NO: 2579069 - RNA, 19 nt, Artificial Sequence
  Description of Artificial Sequence: Synthetic oligonucleotide
  Antisense strand to SEQ ID NO: 2579068
agcucugagauuuaaaggc

SEQ ID NO: 2579070 - RNA, 19 nt, Artificial Sequence
  Description of Artificial Sequence: Synthetic oligonucleotide
  Sense strand starting at position 1420 of SEQ ID NO: 1889110
uagugcuucccugagagau

SEQ ID NO: 2579071 - RNA, 19 nt, Artificial Sequence
  Description of Artificial Sequence: Synthetic oligonucleotide
  Antisense strand to SEQ ID NO: 2579070
aucucucagggaagcacua

SEQ ID NO: 2579072 - RNA, 19 nt, Artificial Sequence
  Description of Artificial Sequence: Synthetic oligonucleotide
  Sense strand starting at position 1422 of SEQ ID NO: 1889110
gugcuucccugagagauga

SEQ ID NO: 2579073 - RNA, 19 nt, Artificial Sequence
  Description of Artificial Sequence: Synthetic oligonucleotide
  Antisense strand to SEQ ID NO: 2579072
ucaucucucagggaagcac

SEQ ID NO: 2579074 - RNA, 19 nt, Artificial Sequence
  Description of Artificial Sequence: Synthetic oligonucleotide
  Sense strand starting at position 1859 of SEQ ID NO: 1889110
gguugucucagcuggcaga

SEQ ID NO: 2579075 - RNA, 19 nt, Artificial Sequence
  Description of Artificial Sequence: Synthetic oligonucleotide
  Antisense strand to SEQ ID NO: 2579074
ucugccagcugagacaacc

SEQ ID NO: 2579076 - RNA, 19 nt, Artificial Sequence
  Description of Artificial Sequence: Synthetic oligonucleotide
  Sense strand starting at position 2065 of SEQ ID NO: 1889110
gucuaagcccucugauuuc

SEQ ID NO: 2579077 - RNA, 19 nt, Artificial Sequence
  Description of Artificial Sequence: Synthetic oligonucleotide
  Antisense strand to SEQ ID NO: 2579076
gaaaucagagggcuuagac

SEQ ID NO: 2579078 - RNA, 19 nt, Artificial Sequence
  Description of Artificial Sequence: Synthetic oligonucleotide
  Sense strand starting at position 2235 of SEQ ID NO: 1889110
uggcaagugucucuucuca

SEQ ID NO: 2579079 - RNA, 19 nt, Artificial Sequence
  Description of Artificial Sequence: Synthetic oligonucleotide
  Antisense strand to SEQ ID NO: 2579078
ugagaagagacacuugcca

SEQ ID NO: 2579080 - RNA, 19 nt, Artificial Sequence
  Description of Artificial Sequence: Synthetic oligonucleotide
  Sense strand starting at position 2237 of SEQ ID NO: 1889110
gcaagugucucuucucauu

SEQ ID NO: 2579081 - RNA, 19 nt, Artificial Sequence
  Description of Artificial Sequence: Synthetic oligonucleotide
  Antisense strand to SEQ ID NO: 2579080
aaugagaagagacacuugc

SEQ ID NO: 2579082 - RNA, 19 nt, Artificial Sequence
  Description of Artificial Sequence: Synthetic oligonucleotide
  Sense strand starting at position 2411 of SEQ ID NO: 1889110
cucuauuaugcagauguga

SEQ ID NO: 2579083 - RNA, 19 nt, Artificial Sequence
  Description of Artificial Sequence: Synthetic oligonucleotide
  Antisense strand to SEQ ID NO: 2579082
ucacaucugcauaauagag

SEQ ID NO: 2579084 - RNA, 19 nt, Artificial Sequence
  Description of Artificial Sequence: Synthetic oligonucleotide
  Sense strand starting at position 2868 of SEQ ID NO: 1889110
uguacaagauguugucaca

SEQ ID NO: 2579085 - RNA, 19 nt, Artificial Sequence
  Description of Artificial Sequence: Synthetic oligonucleotide
  Antisense strand to SEQ ID NO: 2579084
ugugacaacaucuuguaca

SEQ ID NO: 2579086 - RNA, 19 nt, Artificial Sequence
  Description of Artificial Sequence: Synthetic oligonucleotide
  Sense strand starting at position 2891 of SEQ ID NO: 1889110
uuuagugacugagagugau

SEQ ID NO: 2579087 - RNA, 19 nt, Artificial Sequence
  Description of Artificial Sequence: Synthetic oligonucleotide
  Antisense strand to SEQ ID NO: 2579086
aucacucucagucacuaaa

SEQ ID NO: 2579088 - RNA, 19 nt, Artificial Sequence
  Description of Artificial Sequence: Synthetic oligonucleotide
  Sense strand starting at position 2894 of SEQ ID NO: 1889110
agugacugagagugauuga

SEQ ID NO: 2579089 - RNA, 19 nt, Artificial Sequence
  Description of Artificial Sequence: Synthetic oligonucleotide
  Antisense strand to SEQ ID NO: 2579088
ucaaucacucucagucacu

SEQ ID NO: 2579090 - RNA, 19 nt, Artificial Sequence
  Description of Artificial Sequence: Synthetic oligonucleotide
  Sense strand starting at position 2901 of SEQ ID NO: 1889110
gagagugauugauaucaug

SEQ ID NO: 2579091 - RNA, 19 nt, Artificial Sequence
  Description of Artificial Sequence: Synthetic oligonucleotide
  Antisense strand to SEQ ID NO: 2579090
caugauaucaaucacucuc

SEQ ID NO: 2579092 - RNA, 19 nt, Artificial Sequence
  Description of Artificial Sequence: Synthetic oligonucleotide
  Sense strand starting at position 2904 of SEQ ID NO: 1889110
agugauugauaucauggau

SEQ ID NO: 2579093 - RNA, 19 nt, Artificial Sequence
  Description of Artificial Sequence: Synthetic oligonucleotide
  Antisense strand to SEQ ID NO: 2579092
auccaugauaucaaucacu

SEQ ID NO: 2579094 - RNA, 19 nt, Artificial Sequence
  Description of Artificial Sequence: Synthetic oligonucleotide
  Sense strand starting at position 3072 of SEQ ID NO: 1889110
aacuguaggccguguaguu

SEQ ID NO: 2579095 - RNA, 19 nt, Artificial Sequence
  Description of Artificial Sequence: Synthetic oligonucleotide
  Antisense strand to SEQ ID NO: 2579094
aacuacacggccuacaguu

SEQ ID NO: 2579096 - RNA, 19 nt, Artificial Sequence
  Description of Artificial Sequence: Synthetic oligonucleotide
  Sense strand starting at position 3081 of SEQ ID NO: 1889110
ccguguaguuuagagucau

SEQ ID NO: 2579097 - RNA, 19 nt, Artificial Sequence
  Description of Artificial Sequence: Synthetic oligonucleotide
  Antisense strand to SEQ ID NO: 2579096
augacucuaaacuacacgg

SEQ ID NO: 2579098 - RNA, 19 nt, Artificial Sequence
  Description of Artificial Sequence: Synthetic oligonucleotide
  Sense strand starting at position 3085 of SEQ ID NO: 1889110
guaguuuagagucauacau

SEQ ID NO: 2579099 - RNA, 19 nt, Artificial Sequence
  Description of Artificial Sequence: Synthetic oligonucleotide
  Antisense strand to SEQ ID NO: 2579098
auguaugacucuaaacuac

SEQ ID NO: 2579100 - RNA, 19 nt, Artificial Sequence
  Description of Artificial Sequence: Synthetic oligonucleotide
  Sense strand starting at position 3106 of SEQ ID NO: 1889110
ucacaugucuguuagugua

SEQ ID NO: 2579101 - RNA, 19 nt, Artificial Sequence
  Description of Artificial Sequence: Synthetic oligonucleotide
  Antisense strand to SEQ ID NO: 2579100
uacacuaacagacauguga

SEQ ID NO: 2579102 - RNA, 19 nt, Artificial Sequence
  Description of Artificial Sequence: Synthetic oligonucleotide
  Sense strand starting at position 3108 of SEQ ID NO: 1889110
acaugucuguuaguguaaa

SEQ ID NO: 2579103 - RNA, 19 nt, Artificial Sequence
  Description of Artificial Sequence: Synthetic oligonucleotide
  Antisense strand to SEQ ID NO: 2579102
uuuacacuaacagacaugu

SEQ ID NO: 2579104 - RNA, 19 nt, Artificial Sequence
  Description of Artificial Sequence: Synthetic oligonucleotide
  Sense strand starting at position 3109 of SEQ ID NO: 1889110
caugucuguuaguguaaag

SEQ ID NO: 2579105 - RNA, 19 nt, Artificial Sequence
  Description of Artificial Sequence: Synthetic oligonucleotide
  Antisense strand to SEQ ID NO: 2579104
cuuuacacuaacagacaug

SEQ ID NO: 2579106 - RNA, 19 nt, Artificial Sequence
  Description of Artificial Sequence: Synthetic oligonucleotide
  Sense strand starting at position 3134 of SEQ ID NO: 1889110
acgaguaccucucacacuu

SEQ ID NO: 2579107 - RNA, 19 nt, Artificial Sequence
  Description of Artificial Sequence: Synthetic oligonucleotide
  Antisense strand to SEQ ID NO: 2579106
aagugugagagguacucgu

SEQ ID NO: 2579108 - RNA, 19 nt, Artificial Sequence
  Description of Artificial Sequence: Synthetic oligonucleotide
  Sense strand starting at position 3239 of SEQ ID NO: 1889110
uagagagaagucugcuaua

SEQ ID NO: 2579109 - RNA, 19 nt, Artificial Sequence
  Description of Artificial Sequence: Synthetic oligonucleotide
  Antisense strand to SEQ ID NO: 2579108
uauagcagacuucucucua

SEQ ID NO: 2579110 - RNA, 19 nt, Artificial Sequence
  Description of Artificial Sequence: Synthetic oligonucleotide
  Sense strand starting at position 3244 of SEQ ID NO: 1889110
agaagucugcuauacgcuu

SEQ ID NO: 2579111 - RNA, 19 nt, Artificial Sequence
  Description of Artificial Sequence: Synthetic oligonucleotide
  Antisense strand to SEQ ID NO: 2579110
aagcguauagcagacuucu

SEQ ID NO: 2579112 - RNA, 19 nt, Artificial Sequence
  Description of Artificial Sequence: Synthetic oligonucleotide
  Sense strand starting at position 3250 of SEQ ID NO: 1889110
cugcuauacgcuuggaaac

SEQ ID NO: 2579113 - RNA, 19 nt, Artificial Sequence
  Description of Artificial Sequence: Synthetic oligonucleotide
  Antisense strand to SEQ ID NO: 2579112
guuuccaagcguauagcag

SEQ ID NO: 2579114 - RNA, 19 nt, Artificial Sequence
  Description of Artificial Sequence: Synthetic oligonucleotide
  Sense strand starting at position 780 of SEQ ID NO: 1889111
ccucuuuacugauagggac

SEQ ID NO: 2579115 - RNA, 19 nt, Artificial Sequence
  Description of Artificial Sequence: Synthetic oligonucleotide
  Antisense strand to SEQ ID NO: 2579114
gucccuaucaguaaagagg

SEQ ID NO: 2579116 - RNA, 19 nt, Artificial Sequence
  Description of Artificial Sequence: Synthetic oligonucleotide
  Sense strand starting at position 1134 of SEQ ID NO: 1889111
ucugccaccuugugauuga

SEQ ID NO: 2579117 - RNA, 19 nt, Artificial Sequence
  Description of Artificial Sequence: Synthetic oligonucleotide
  Antisense strand to SEQ ID NO: 2579116
ucaaucacaagguggcaga

SEQ ID NO: 2579118 - RNA, 19 nt, Artificial Sequence
  Description of Artificial Sequence: Synthetic oligonucleotide
  Sense strand starting at position 1137 of SEQ ID NO: 1889111
gccaccuugugauugagaa

SEQ ID NO: 2579119 - RNA, 19 nt, Artificial Sequence
  Description of Artificial Sequence: Synthetic oligonucleotide
  Antisense strand to SEQ ID NO: 2579118
uucucaaucacaagguggc

SEQ ID NO: 2579120 - RNA, 19 nt, Artificial Sequence
  Description of Artificial Sequence: Synthetic oligonucleotide
  Sense strand starting at position 1138 of SEQ ID NO: 1889111
ccaccuugugauugagaaa

SEQ ID NO: 2579121 - RNA, 19 nt, Artificial Sequence
  Description of Artificial Sequence: Synthetic oligonucleotide
  Antisense strand to SEQ ID NO: 2579120
uuucucaaucacaaggugg

SEQ ID NO: 2579122 - RNA, 19 nt, Artificial Sequence
  Description of Artificial Sequence: Synthetic oligonucleotide
  Sense strand starting at position 1141 of SEQ ID NO: 1889111
ccuugugauugagaaaggu

SEQ ID NO: 2579123 - RNA, 19 nt, Artificial Sequence
  Description of Artificial Sequence: Synthetic oligonucleotide
  Antisense strand to SEQ ID NO: 2579122
accuuucucaaucacaagg

SEQ ID NO: 2579124 - RNA, 19 nt, Artificial Sequence
  Description of Artificial Sequence: Synthetic oligonucleotide
  Sense strand starting at position 1145 of SEQ ID NO: 1889111
gugauugagaaaggugcau

SEQ ID NO: 2579125 - RNA, 19 nt, Artificial Sequence
  Description of Artificial Sequence: Synthetic oligonucleotide
  Antisense strand to SEQ ID NO: 2579124
augcaccuuucucaaucac

SEQ ID NO: 2579126 - RNA, 19 nt, Artificial Sequence
  Description of Artificial Sequence: Synthetic oligonucleotide
  Sense strand starting at position 1268 of SEQ ID NO: 1889111
gccuuuaaaucucagagcu

SEQ ID NO: 2579127 - RNA, 19 nt, Artificial Sequence
  Description of Artificial Sequence: Synthetic oligonucleotide
  Antisense strand to SEQ ID NO: 2579126
agcucugagauuuaaaggc

SEQ ID NO: 2579128 - RNA, 19 nt, Artificial Sequence
  Description of Artificial Sequence: Synthetic oligonucleotide
  Sense strand starting at position 1421 of SEQ ID NO: 1889111
uagugcuucccugagagau

SEQ ID NO: 2579129 - RNA, 19 nt, Artificial Sequence
  Description of Artificial Sequence: Synthetic oligonucleotide
  Antisense strand to SEQ ID NO: 2579128
aucucucagggaagcacua

SEQ ID NO: 2579130 - RNA, 19 nt, Artificial Sequence
  Description of Artificial Sequence: Synthetic oligonucleotide
  Sense strand starting at position 1423 of SEQ ID NO: 1889111
gugcuucccugagagauga

SEQ ID NO: 2579131 - RNA, 19 nt, Artificial Sequence
  Description of Artificial Sequence: Synthetic oligonucleotide
  Antisense strand to SEQ ID NO: 2579130
ucaucucucagggaagcac

SEQ ID NO: 2579132 - RNA, 19 nt, Artificial Sequence
  Description of Artificial Sequence: Synthetic oligonucleotide
  Sense strand starting at position 2236 of SEQ ID NO: 1889111
uggcaagugucucuucuca

SEQ ID NO: 2579133 - RNA, 19 nt, Artificial Sequence
  Description of Artificial Sequence: Synthetic oligonucleotide
  Antisense strand to SEQ ID NO: 2579132
ugagaagagacacuugcca

SEQ ID NO: 2579134 - RNA, 19 nt, Artificial Sequence
  Description of Artificial Sequence: Synthetic oligonucleotide
  Sense strand starting at position 2238 of SEQ ID NO: 1889111
gcaagugucucuucucauu

SEQ ID NO: 2579135 - RNA, 19 nt, Artificial Sequence
  Description of Artificial Sequence: Synthetic oligonucleotide
  Antisense strand to SEQ ID NO: 2579134
aaugagaagagacacuugc

SEQ ID NO: 2579136 - RNA, 19 nt, Artificial Sequence
  Description of Artificial Sequence: Synthetic oligonucleotide
  Sense strand starting at position 2412 of SEQ ID NO: 1889111
cucuauuaugcagauguga

SEQ ID NO: 2579137 - RNA, 19 nt, Artificial Sequence
  Description of Artificial Sequence: Synthetic oligonucleotide
  Antisense strand to SEQ ID NO: 2579136
ucacaucugcauaauagag

SEQ ID NO: 2579138 - RNA, 19 nt, Artificial Sequence
  Description of Artificial Sequence: Synthetic oligonucleotide
  Sense strand starting at position 2869 of SEQ ID NO: 1889111
uguacaagauguugucaca

SEQ ID NO: 2579139 - RNA, 19 nt, Artificial Sequence
  Description of Artificial Sequence: Synthetic oligonucleotide
  Antisense strand to SEQ ID NO: 2579138
ugugacaacaucuuguaca

SEQ ID NO: 2579140 - RNA, 19 nt, Artificial Sequence
  Description of Artificial Sequence: Synthetic oligonucleotide
  Sense strand starting at position 2872 of SEQ ID NO: 1889111
acaagauguugucacaauc

SEQ ID NO: 2579141 - RNA, 19 nt, Artificial Sequence
  Description of Artificial Sequence: Synthetic oligonucleotide
  Antisense strand to SEQ ID NO: 2579140
gauugugacaacaucuugu

SEQ ID NO: 2579142 - RNA, 19 nt, Artificial Sequence
  Description of Artificial Sequence: Synthetic oligonucleotide
  Sense strand starting at position 2892 of SEQ ID NO: 1889111
uuuagugacugagagugau

SEQ ID NO: 2579143 - RNA, 19 nt, Artificial Sequence
  Description of Artificial Sequence: Synthetic oligonucleotide
  Antisense strand to SEQ ID NO: 2579142
aucacucucagucacuaaa

SEQ ID NO: 2579144 - RNA, 19 nt, Artificial Sequence
  Description of Artificial Sequence: Synthetic oligonucleotide
  Sense strand starting at position 2895 of SEQ ID NO: 1889111
agugacugagagugauuga

SEQ ID NO: 2579145 - RNA, 19 nt, Artificial Sequence
  Description of Artificial Sequence: Synthetic oligonucleotide
  Antisense strand to SEQ ID NO: 2579144
ucaaucacucucagucacu

SEQ ID NO: 2579146 - RNA, 19 nt, Artificial Sequence
  Description of Artificial Sequence: Synthetic oligonucleotide
  Sense strand starting at position 2902 of SEQ ID NO: 1889111
gagagugauugauaucaug

SEQ ID NO: 2579147 - RNA, 19 nt, Artificial Sequence
  Description of Artificial Sequence: Synthetic oligonucleotide
  Antisense strand to SEQ ID NO: 2579146
caugauaucaaucacucuc

SEQ ID NO: 2579148 - RNA, 19 nt, Artificial Sequence
  Description of Artificial Sequence: Synthetic oligonucleotide
  Sense strand starting at position 2905 of SEQ ID NO: 1889111
agugauugauaucauggau

SEQ ID NO: 2579149 - RNA, 19 nt, Artificial Sequence
  Description of Artificial Sequence: Synthetic oligonucleotide
  Antisense strand to SEQ ID NO: 2579148
auccaugauaucaaucacu

SEQ ID NO: 2579150 - RNA, 19 nt, Artificial Sequence
  Description of Artificial Sequence: Synthetic oligonucleotide
  Sense strand starting at position 3073 of SEQ ID NO: 1889111
aacuguaggccguguaguu

SEQ ID NO: 2579151 - RNA, 19 nt, Artificial Sequence
  Description of Artificial Sequence: Synthetic oligonucleotide
  Antisense strand to SEQ ID NO: 2579150
aacuacacggccuacaguu

SEQ ID NO: 2579152 - RNA, 19 nt, Artificial Sequence
  Description of Artificial Sequence: Synthetic oligonucleotide
  Sense strand starting at position 3082 of SEQ ID NO: 1889111
ccguguaguuuagagucau

SEQ ID NO: 2579153 - RNA, 19 nt, Artificial Sequence
  Description of Artificial Sequence: Synthetic oligonucleotide
  Antisense strand to SEQ ID NO: 2579152
augacucuaaacuacacgg

SEQ ID NO: 2579154 - RNA, 19 nt, Artificial Sequence
  Description of Artificial Sequence: Synthetic oligonucleotide
  Sense strand starting at position 3086 of SEQ ID NO: 1889111
guaguuuagagucauacau

SEQ ID NO: 2579155 - RNA, 19 nt, Artificial Sequence
  Description of Artificial Sequence: Synthetic oligonucleotide
  Antisense strand to SEQ ID NO: 2579154
auguaugacucuaaacuac

SEQ ID NO: 2579156 - RNA, 19 nt, Artificial Sequence
  Description of Artificial Sequence: Synthetic oligonucleotide
  Sense strand starting at position 3109 of SEQ ID NO: 1889111
acaugucuguuaguguaaa

SEQ ID NO: 2579157 - RNA, 19 nt, Artificial Sequence
  Description of Artificial Sequence: Synthetic oligonucleotide
  Antisense strand to SEQ ID NO: 2579156
uuuacacuaacagacaugu

SEQ ID NO: 2579158 - RNA, 19 nt, Artificial Sequence
  Description of Artificial Sequence: Synthetic oligonucleotide
  Sense strand starting at position 3110 of SEQ ID NO: 1889111
caugucuguuaguguaaag

SEQ ID NO: 2579159 - RNA, 19 nt, Artificial Sequence
  Description of Artificial Sequence: Synthetic oligonucleotide
  Antisense strand to SEQ ID NO: 2579158
cuuuacacuaacagacaug

SEQ ID NO: 2579160 - RNA, 19 nt, Artificial Sequence
  Description of Artificial Sequence: Synthetic oligonucleotide
  Sense strand starting at position 3135 of SEQ ID NO: 1889111
acgaguaccucucacacuu

SEQ ID NO: 2579161 - RNA, 19 nt, Artificial Sequence
  Description of Artificial Sequence: Synthetic oligonucleotide
  Antisense strand to SEQ ID NO: 2579160
aagugugagagguacucgu

SEQ ID NO: 2579162 - RNA, 19 nt, Artificial Sequence
  Description of Artificial Sequence: Synthetic oligonucleotide
  Sense strand starting at position 3245 of SEQ ID NO: 1889111
agaagucugcuauacgcuu

SEQ ID NO: 2579163 - RNA, 19 nt, Artificial Sequence
  Description of Artificial Sequence: Synthetic oligonucleotide
  Antisense strand to SEQ ID NO: 2579162
aagcguauagcagacuucu

SEQ ID NO: 2579164 - RNA, 19 nt, Artificial Sequence
  Description of Artificial Sequence: Synthetic oligonucleotide
  Sense strand starting at position 3251 of SEQ ID NO: 1889111
cugcuauacgcuuggaaac

SEQ ID NO: 2579165 - RNA, 19 nt, Artificial Sequence
  Description of Artificial Sequence: Synthetic oligonucleotide
  Antisense strand to SEQ ID NO: 2579164
guuuccaagcguauagcag

SEQ ID NO: 2579166 - RNA, 19 nt, Artificial Sequence
  Description of Artificial Sequence: Synthetic oligonucleotide
  Sense strand starting at position 779 of SEQ ID NO: 1889112
ccucuuuacugauagggac

SEQ ID NO: 2579167 - RNA, 19 nt, Artificial Sequence
  Description of Artificial Sequence: Synthetic oligonucleotide
  Antisense strand to SEQ ID NO: 2579166
gucccuaucaguaaagagg

SEQ ID NO: 2579168 - RNA, 19 nt, Artificial Sequence
  Description of Artificial Sequence: Synthetic oligonucleotide
  Sense strand starting at position 1133 of SEQ ID NO: 1889112
ucugccaccuugugauuga

SEQ ID NO: 2579169 - RNA, 19 nt, Artificial Sequence
  Description of Artificial Sequence: Synthetic oligonucleotide
  Antisense strand to SEQ ID NO: 2579168
ucaaucacaagguggcaga

SEQ ID NO: 2579170 - RNA, 19 nt, Artificial Sequence
  Description of Artificial Sequence: Synthetic oligonucleotide
  Sense strand starting at position 1136 of SEQ ID NO: 1889112
gccaccuugugauugagaa

SEQ ID NO: 2579171 - RNA, 19 nt, Artificial Sequence
  Description of Artificial Sequence: Synthetic oligonucleotide
  Antisense strand to SEQ ID NO: 2579170
uucucaaucacaagguggc

SEQ ID NO: 2579172 - RNA, 19 nt, Artificial Sequence
  Description of Artificial Sequence: Synthetic oligonucleotide
  Sense strand starting at position 1137 of SEQ ID NO: 1889112
ccaccuugugauugagaaa

SEQ ID NO: 2579173 - RNA, 19 nt, Artificial Sequence
  Description of Artificial Sequence: Synthetic oligonucleotide
  Antisense strand to SEQ ID NO: 2579172
uuucucaaucacaaggugg

SEQ ID NO: 2579174 - RNA, 19 nt, Artificial Sequence
  Description of Artificial Sequence: Synthetic oligonucleotide
  Sense strand starting at position 1140 of SEQ ID NO: 1889112
ccuugugauugagaaaggu

SEQ ID NO: 2579175 - RNA, 19 nt, Artificial Sequence
  Description of Artificial Sequence: Synthetic oligonucleotide
  Antisense strand to SEQ ID NO: 2579174
accuuucucaaucacaagg

SEQ ID NO: 2579176 - RNA, 19 nt, Artificial Sequence
  Description of Artificial Sequence: Synthetic oligonucleotide
  Sense strand starting at position 1144 of SEQ ID NO: 1889112
gugauugagaaaggugcau

SEQ ID NO: 2579177 - RNA, 19 nt, Artificial Sequence
  Description of Artificial Sequence: Synthetic oligonucleotide
  Antisense strand to SEQ ID NO: 2579176
augcaccuuucucaaucac

SEQ ID NO: 2579178 - RNA, 19 nt, Artificial Sequence
  Description of Artificial Sequence: Synthetic oligonucleotide
  Sense strand starting at position 1267 of SEQ ID NO: 1889112
gccuuuaaaucucagagcu

SEQ ID NO: 2579179 - RNA, 19 nt, Artificial Sequence
  Description of Artificial Sequence: Synthetic oligonucleotide
  Antisense strand to SEQ ID NO: 2579178
agcucugagauuuaaaggc

SEQ ID NO: 2579180 - RNA, 19 nt, Artificial Sequence
  Description of Artificial Sequence: Synthetic oligonucleotide
  Sense strand starting at position 1420 of SEQ ID NO: 1889112
uagugcuucccugagagau

SEQ ID NO: 2579181 - RNA, 19 nt, Artificial Sequence
  Description of Artificial Sequence: Synthetic oligonucleotide
  Antisense strand to SEQ ID NO: 2579180
aucucucagggaagcacua

SEQ ID NO: 2579182 - RNA, 19 nt, Artificial Sequence
  Description of Artificial Sequence: Synthetic oligonucleotide
  Sense strand starting at position 1422 of SEQ ID NO: 1889112
gugcuucccugagagauga

SEQ ID NO: 2579183 - RNA, 19 nt, Artificial Sequence
  Description of Artificial Sequence: Synthetic oligonucleotide
  Antisense strand to SEQ ID NO: 2579182
ucaucucucagggaagcac

SEQ ID NO: 2579184 - RNA, 19 nt, Artificial Sequence
  Description of Artificial Sequence: Synthetic oligonucleotide
  Sense strand starting at position 1859 of SEQ ID NO: 1889112
gguugucucagcuggcaga

SEQ ID NO: 2579185 - RNA, 19 nt, Artificial Sequence
  Description of Artificial Sequence: Synthetic oligonucleotide
  Antisense strand to SEQ ID NO: 2579184
ucugccagcugagacaacc

SEQ ID NO: 2579186 - RNA, 19 nt, Artificial Sequence
  Description of Artificial Sequence: Synthetic oligonucleotide
  Sense strand starting at position 2065 of SEQ ID NO: 1889112
gucuaagcccucugauuuc

SEQ ID NO: 2579187 - RNA, 19 nt, Artificial Sequence
  Description of Artificial Sequence: Synthetic oligonucleotide
  Antisense strand to SEQ ID NO: 2579186
gaaaucagagggcuuagac

SEQ ID NO: 2579188 - RNA, 19 nt, Artificial Sequence
  Description of Artificial Sequence: Synthetic oligonucleotide
  Sense strand starting at position 2235 of SEQ ID NO: 1889112
uggcaagugucucuucuca

SEQ ID NO: 2579189 - RNA, 19 nt, Artificial Sequence
  Description of Artificial Sequence: Synthetic oligonucleotide
  Antisense strand to SEQ ID NO: 2579188
ugagaagagacacuugcca

SEQ ID NO: 2579190 - RNA, 19 nt, Artificial Sequence
  Description of Artificial Sequence: Synthetic oligonucleotide
  Sense strand starting at position 2237 of SEQ ID NO: 1889112
gcaagugucucuucucauu

SEQ ID NO: 2579191 - RNA, 19 nt, Artificial Sequence
  Description of Artificial Sequence: Synthetic oligonucleotide
  Antisense strand to SEQ ID NO: 2579190
aaugagaagagacacuugc

SEQ ID NO: 2579192 - RNA, 19 nt, Artificial Sequence
  Description of Artificial Sequence: Synthetic oligonucleotide
  Sense strand starting at position 2411 of SEQ ID NO: 1889112
cucuauuaugcagauguga

SEQ ID NO: 2579193 - RNA, 19 nt, Artificial Sequence
  Description of Artificial Sequence: Synthetic oligonucleotide
  Antisense strand to SEQ ID NO: 2579192
ucacaucugcauaauagag

SEQ ID NO: 2579194 - RNA, 19 nt, Artificial Sequence
  Description of Artificial Sequence: Synthetic oligonucleotide
  Sense strand starting at position 2868 of SEQ ID NO: 1889112
uguacaagauguugucaca

SEQ ID NO: 2579195 - RNA, 19 nt, Artificial Sequence
  Description of Artificial Sequence: Synthetic oligonucleotide
  Antisense strand to SEQ ID NO: 2579194
ugugacaacaucuuguaca

SEQ ID NO: 2579196 - RNA, 19 nt, Artificial Sequence
  Description of Artificial Sequence: Synthetic oligonucleotide
  Sense strand starting at position 2891 of SEQ ID NO: 1889112
uuuagugacugagagugau

SEQ ID NO: 2579197 - RNA, 19 nt, Artificial Sequence
  Description of Artificial Sequence: Synthetic oligonucleotide
  Antisense strand to SEQ ID NO: 2579196
aucacucucagucacuaaa

SEQ ID NO: 2579198 - RNA, 19 nt, Artificial Sequence
  Description of Artificial Sequence: Synthetic oligonucleotide
  Sense strand starting at position 2894 of SEQ ID NO: 1889112
agugacugagagugauuga

SEQ ID NO: 2579199 - RNA, 19 nt, Artificial Sequence
  Description of Artificial Sequence: Synthetic oligonucleotide
  Antisense strand to SEQ ID NO: 2579198
ucaaucacucucagucacu

SEQ ID NO: 2579200 - RNA, 19 nt, Artificial Sequence
  Description of Artificial Sequence: Synthetic oligonucleotide
  Sense strand starting at position 2901 of SEQ ID NO: 1889112
gagagugauugauaucaug

SEQ ID NO: 2579201 - RNA, 19 nt, Artificial Sequence
  Description of Artificial Sequence: Synthetic oligonucleotide
  Antisense strand to SEQ ID NO: 2579200
caugauaucaaucacucuc

SEQ ID NO: 2579202 - RNA, 19 nt, Artificial Sequence
  Description of Artificial Sequence: Synthetic oligonucleotide
  Sense strand starting at position 2904 of SEQ ID NO: 1889112
agugauugauaucauggau

SEQ ID NO: 2579203 - RNA, 19 nt, Artificial Sequence
  Description of Artificial Sequence: Synthetic oligonucleotide
  Antisense strand to SEQ ID NO: 2579202
auccaugauaucaaucacu

SEQ ID NO: 2579204 - RNA, 19 nt, Artificial Sequence
  Description of Artificial Sequence: Synthetic oligonucleotide
  Sense strand starting at position 3072 of SEQ ID NO: 1889112
aacuguaggccguguaguu

SEQ ID NO: 2579205 - RNA, 19 nt, Artificial Sequence
  Description of Artificial Sequence: Synthetic oligonucleotide
  Antisense strand to SEQ ID NO: 2579204
aacuacacggccuacaguu

SEQ ID NO: 2579206 - RNA, 19 nt, Artificial Sequence
  Description of Artificial Sequence: Synthetic oligonucleotide
  Sense strand starting at position 3081 of SEQ ID NO: 1889112
ccguguaguuuagagucau

SEQ ID NO: 2579207 - RNA, 19 nt, Artificial Sequence
  Description of Artificial Sequence: Synthetic oligonucleotide
  Antisense strand to SEQ ID NO: 2579206
augacucuaaacuacacgg

SEQ ID NO: 2579208 - RNA, 19 nt, Artificial Sequence
  Description of Artificial Sequence: Synthetic oligonucleotide
  Sense strand starting at position 3085 of SEQ ID NO: 1889112
guaguuuagagucauacau

SEQ ID NO: 2579209 - RNA, 19 nt, Artificial Sequence
  Description of Artificial Sequence: Synthetic oligonucleotide
  Antisense strand to SEQ ID NO: 2579208
auguaugacucuaaacuac

SEQ ID NO: 2579210 - RNA, 19 nt, Artificial Sequence
  Description of Artificial Sequence: Synthetic oligonucleotide
  Sense strand starting at position 3106 of SEQ ID NO: 1889112
ucacaugucuguuagugua

SEQ ID NO: 2579211 - RNA, 19 nt, Artificial Sequence
  Description of Artificial Sequence: Synthetic oligonucleotide
  Antisense strand to SEQ ID NO: 2579210
uacacuaacagacauguga

SEQ ID NO: 2579212 - RNA, 19 nt, Artificial Sequence
  Description of Artificial Sequence: Synthetic oligonucleotide
  Sense strand starting at position 3108 of SEQ ID NO: 1889112
acaugucuguuaguguaaa

SEQ ID NO: 2579213 - RNA, 19 nt, Artificial Sequence
  Description of Artificial Sequence: Synthetic oligonucleotide
  Antisense strand to SEQ ID NO: 2579212
uuuacacuaacagacaugu

SEQ ID NO: 2579214 - RNA, 19 nt, Artificial Sequence
  Description of Artificial Sequence: Synthetic oligonucleotide
  Sense strand starting at position 3109 of SEQ ID NO: 1889112
caugucuguuaguguaaag

SEQ ID NO: 2579215 - RNA, 19 nt, Artificial Sequence
  Description of Artificial Sequence: Synthetic oligonucleotide
  Antisense strand to SEQ ID NO: 2579214
cuuuacacuaacagacaug

SEQ ID NO: 2579216 - RNA, 19 nt, Artificial Sequence
  Description of Artificial Sequence: Synthetic oligonucleotide
  Sense strand starting at position 3134 of SEQ ID NO: 1889112
acgaguaccucucacacuu

SEQ ID NO: 2579217 - RNA, 19 nt, Artificial Sequence
  Description of Artificial Sequence: Synthetic oligonucleotide
  Antisense strand to SEQ ID NO: 2579216
aagugugagagguacucgu

SEQ ID NO: 2579218 - RNA, 19 nt, Artificial Sequence
  Description of Artificial Sequence: Synthetic oligonucleotide
  Sense strand starting at position 3239 of SEQ ID NO: 1889112
uagagagaagucugcuaua

SEQ ID NO: 2579219 - RNA, 19 nt, Artificial Sequence
  Description of Artificial Sequence: Synthetic oligonucleotide
  Antisense strand to SEQ ID NO: 2579218
uauagcagacuucucucua

SEQ ID NO: 2579220 - RNA, 19 nt, Artificial Sequence
  Description of Artificial Sequence: Synthetic oligonucleotide
  Sense strand starting at position 3244 of SEQ ID NO: 1889112
agaagucugcuauacgcuu

SEQ ID NO: 2579221 - RNA, 19 nt, Artificial Sequence
  Description of Artificial Sequence: Synthetic oligonucleotide
  Antisense strand to SEQ ID NO: 2579220
aagcguauagcagacuucu

SEQ ID NO: 2579222 - RNA, 19 nt, Artificial Sequence
  Description of Artificial Sequence: Synthetic oligonucleotide
  Sense strand starting at position 3250 of SEQ ID NO: 1889112
cugcuauacgcuuggaaac

SEQ ID NO: 2579223 - RNA, 19 nt, Artificial Sequence
  Description of Artificial Sequence: Synthetic oligonucleotide
  Antisense strand to SEQ ID NO: 2579222
guuuccaagcguauagcag

SEQ ID NO: 2579224 - RNA, 19 nt, Artificial Sequence
  Description of Artificial Sequence: Synthetic oligonucleotide
  Sense strand starting at position 780 of SEQ ID NO: 1889113
ccucuuuacugauagggac

SEQ ID NO: 2579225 - RNA, 19 nt, Artificial Sequence
  Description of Artificial Sequence: Synthetic oligonucleotide
  Antisense strand to SEQ ID NO: 2579224
gucccuaucaguaaagagg

SEQ ID NO: 2579226 - RNA, 19 nt, Artificial Sequence
  Description of Artificial Sequence: Synthetic oligonucleotide
  Sense strand starting at position 1134 of SEQ ID NO: 1889113
ucugccaccuugugauuga

SEQ ID NO: 2579227 - RNA, 19 nt, Artificial Sequence
  Description of Artificial Sequence: Synthetic oligonucleotide
  Antisense strand to SEQ ID NO: 2579226
ucaaucacaagguggcaga

SEQ ID NO: 2579228 - RNA, 19 nt, Artificial Sequence
  Description of Artificial Sequence: Synthetic oligonucleotide
  Sense strand starting at position 1137 of SEQ ID NO: 1889113
gccaccuugugauugagaa

SEQ ID NO: 2579229 - RNA, 19 nt, Artificial Sequence
  Description of Artificial Sequence: Synthetic oligonucleotide
  Antisense strand to SEQ ID NO: 2579228
uucucaaucacaagguggc

SEQ ID NO: 2579230 - RNA, 19 nt, Artificial Sequence
  Description of Artificial Sequence: Synthetic oligonucleotide
  Sense strand starting at position 1138 of SEQ ID NO: 1889113
ccaccuugugauugagaaa

SEQ ID NO: 2579231 - RNA, 19 nt, Artificial Sequence
  Description of Artificial Sequence: Synthetic oligonucleotide
  Antisense strand to SEQ ID NO: 2579230
uuucucaaucacaaggugg

SEQ ID NO: 2579232 - RNA, 19 nt, Artificial Sequence
  Description of Artificial Sequence: Synthetic oligonucleotide
  Sense strand starting at position 1141 of SEQ ID NO: 1889113
ccuugugauugagaaaggu

SEQ ID NO: 2579233 - RNA, 19 nt, Artificial Sequence
  Description of Artificial Sequence: Synthetic oligonucleotide
  Antisense strand to SEQ ID NO: 2579232
accuuucucaaucacaagg

SEQ ID NO: 2579234 - RNA, 19 nt, Artificial Sequence
  Description of Artificial Sequence: Synthetic oligonucleotide
  Sense strand starting at position 1145 of SEQ ID NO: 1889113
gugauugagaaaggugcau

SEQ ID NO: 2579235 - RNA, 19 nt, Artificial Sequence
  Description of Artificial Sequence: Synthetic oligonucleotide
  Antisense strand to SEQ ID NO: 2579234
augcaccuuucucaaucac

SEQ ID NO: 2579236 - RNA, 19 nt, Artificial Sequence
  Description of Artificial Sequence: Synthetic oligonucleotide
  Sense strand starting at position 1268 of SEQ ID NO: 1889113
gccuuuaaaucucagagcu

SEQ ID NO: 2579237 - RNA, 19 nt, Artificial Sequence
  Description of Artificial Sequence: Synthetic oligonucleotide
  Antisense strand to SEQ ID NO: 2579236
agcucugagauuuaaaggc

SEQ ID NO: 2579238 - RNA, 19 nt, Artificial Sequence
  Description of Artificial Sequence: Synthetic oligonucleotide
  Sense strand starting at position 1421 of SEQ ID NO: 1889113
uagugcuucccugagagau

SEQ ID NO: 2579239 - RNA, 19 nt, Artificial Sequence
  Description of Artificial Sequence: Synthetic oligonucleotide
  Antisense strand to SEQ ID NO: 2579238
aucucucagggaagcacua

SEQ ID NO: 2579240 - RNA, 19 nt, Artificial Sequence
  Description of Artificial Sequence: Synthetic oligonucleotide
  Sense strand starting at position 1423 of SEQ ID NO: 1889113
gugcuucccugagagauga

SEQ ID NO: 2579241 - RNA, 19 nt, Artificial Sequence
  Description of Artificial Sequence: Synthetic oligonucleotide
  Antisense strand to SEQ ID NO: 2579240
ucaucucucagggaagcac

SEQ ID NO: 2579242 - RNA, 19 nt, Artificial Sequence
  Description of Artificial Sequence: Synthetic oligonucleotide
  Sense strand starting at position 2236 of SEQ ID NO: 1889113
uggcaagugucucuucuca

SEQ ID NO: 2579243 - RNA, 19 nt, Artificial Sequence
  Description of Artificial Sequence: Synthetic oligonucleotide
  Antisense strand to SEQ ID NO: 2579242
ugagaagagacacuugcca

SEQ ID NO: 2579244 - RNA, 19 nt, Artificial Sequence
  Description of Artificial Sequence: Synthetic oligonucleotide
  Sense strand starting at position 2238 of SEQ ID NO: 1889113
gcaagugucucuucucauu

SEQ ID NO: 2579245 - RNA, 19 nt, Artificial Sequence
  Description of Artificial Sequence: Synthetic oligonucleotide
  Antisense strand to SEQ ID NO: 2579244
aaugagaagagacacuugc

SEQ ID NO: 2579246 - RNA, 19 nt, Artificial Sequence
  Description of Artificial Sequence: Synthetic oligonucleotide
  Sense strand starting at position 2412 of SEQ ID NO: 1889113
cucuauuaugcagauguga

SEQ ID NO: 2579247 - RNA, 19 nt, Artificial Sequence
  Description of Artificial Sequence: Synthetic oligonucleotide
  Antisense strand to SEQ ID NO: 2579246
ucacaucugcauaauagag

SEQ ID NO: 2579248 - RNA, 19 nt, Artificial Sequence
  Description of Artificial Sequence: Synthetic oligonucleotide
  Sense strand starting at position 2869 of SEQ ID NO: 1889113
uguacaagauguugucaca

SEQ ID NO: 2579249 - RNA, 19 nt, Artificial Sequence
  Description of Artificial Sequence: Synthetic oligonucleotide
  Antisense strand to SEQ ID NO: 2579248
ugugacaacaucuuguaca

SEQ ID NO: 2579250 - RNA, 19 nt, Artificial Sequence
  Description of Artificial Sequence: Synthetic oligonucleotide
  Sense strand starting at position 2872 of SEQ ID NO: 1889113
acaagauguugucacaauc

SEQ ID NO: 2579251 - RNA, 19 nt, Artificial Sequence
  Description of Artificial Sequence: Synthetic oligonucleotide
  Antisense strand to SEQ ID NO: 2579250
gauugugacaacaucuugu

SEQ ID NO: 2579252 - RNA, 19 nt, Artificial Sequence
  Description of Artificial Sequence: Synthetic oligonucleotide
  Sense strand starting at position 2892 of SEQ ID NO: 1889113
uuuagugacugagagugau

SEQ ID NO: 2579253 - RNA, 19 nt, Artificial Sequence
  Description of Artificial Sequence: Synthetic oligonucleotide
  Antisense strand to SEQ ID NO: 2579252
aucacucucagucacuaaa

SEQ ID NO: 2579254 - RNA, 19 nt, Artificial Sequence
  Description of Artificial Sequence: Synthetic oligonucleotide
  Sense strand starting at position 2895 of SEQ ID NO: 1889113
agugacugagagugauuga

SEQ ID NO: 2579255 - RNA, 19 nt, Artificial Sequence
  Description of Artificial Sequence: Synthetic oligonucleotide
  Antisense strand to SEQ ID NO: 2579254
ucaaucacucucagucacu

SEQ ID NO: 2579256 - RNA, 19 nt, Artificial Sequence
  Description of Artificial Sequence: Synthetic oligonucleotide
  Sense strand starting at position 2902 of SEQ ID NO: 1889113
gagagugauugauaucaug

SEQ ID NO: 2579257 - RNA, 19 nt, Artificial Sequence
  Description of Artificial Sequence: Synthetic oligonucleotide
  Antisense strand to SEQ ID NO: 2579256
caugauaucaaucacucuc

SEQ ID NO: 2579258 - RNA, 19 nt, Artificial Sequence
  Description of Artificial Sequence: Synthetic oligonucleotide
  Sense strand starting at position 2905 of SEQ ID NO: 1889113
agugauugauaucauggau

SEQ ID NO: 2579259 - RNA, 19 nt, Artificial Sequence
  Description of Artificial Sequence: Synthetic oligonucleotide
  Antisense strand to SEQ ID NO: 2579258
auccaugauaucaaucacu

SEQ ID NO: 2579260 - RNA, 19 nt, Artificial Sequence
  Description of Artificial Sequence: Synthetic oligonucleotide
  Sense strand starting at position 3073 of SEQ ID NO: 1889113
aacuguaggccguguaguu

SEQ ID NO: 2579261 - RNA, 19 nt, Artificial Sequence
  Description of Artificial Sequence: Synthetic oligonucleotide
  Antisense strand to SEQ ID NO: 2579260
aacuacacggccuacaguu

SEQ ID NO: 2579262 - RNA, 19 nt, Artificial Sequence
  Description of Artificial Sequence: Synthetic oligonucleotide
  Sense strand starting at position 3082 of SEQ ID NO: 1889113
ccguguaguuuagagucau

SEQ ID NO: 2579263 - RNA, 19 nt, Artificial Sequence
  Description of Artificial Sequence: Synthetic oligonucleotide
  Antisense strand to SEQ ID NO: 2579262
augacucuaaacuacacgg

SEQ ID NO: 2579264 - RNA, 19 nt, Artificial Sequence
  Description of Artificial Sequence: Synthetic oligonucleotide
  Sense strand starting at position 3086 of SEQ ID NO: 1889113
guaguuuagagucauacau

SEQ ID NO: 2579265 - RNA, 19 nt, Artificial Sequence
  Description of Artificial Sequence: Synthetic oligonucleotide
  Antisense strand to SEQ ID NO: 2579264
auguaugacucuaaacuac

SEQ ID NO: 2579266 - RNA, 19 nt, Artificial Sequence
  Description of Artificial Sequence: Synthetic oligonucleotide
  Sense strand starting at position 3109 of SEQ ID NO: 1889113
acaugucuguuaguguaaa

SEQ ID NO: 2579267 - RNA, 19 nt, Artificial Sequence
  Description of Artificial Sequence: Synthetic oligonucleotide
  Antisense strand to SEQ ID NO: 2579266
uuuacacuaacagacaugu

SEQ ID NO: 2579268 - RNA, 19 nt, Artificial Sequence
  Description of Artificial Sequence: Synthetic oligonucleotide
  Sense strand starting at position 3110 of SEQ ID NO: 1889113
caugucuguuaguguaaag

SEQ ID NO: 2579269 - RNA, 19 nt, Artificial Sequence
  Description of Artificial Sequence: Synthetic oligonucleotide
  Antisense strand to SEQ ID NO: 2579268
cuuuacacuaacagacaug

SEQ ID NO: 2579270 - RNA, 19 nt, Artificial Sequence
  Description of Artificial Sequence: Synthetic oligonucleotide
  Sense strand starting at position 3135 of SEQ ID NO: 1889113
acgaguaccucucacacuu

SEQ ID NO: 2579271 - RNA, 19 nt, Artificial Sequence
  Description of Artificial Sequence: Synthetic oligonucleotide
  Antisense strand to SEQ ID NO: 2579270
aagugugagagguacucgu

SEQ ID NO: 2579272 - RNA, 19 nt, Artificial Sequence
  Description of Artificial Sequence: Synthetic oligonucleotide
  Sense strand starting at position 3245 of SEQ ID NO: 1889113
agaagucugcuauacgcuu

SEQ ID NO: 2579273 - RNA, 19 nt, Artificial Sequence
  Description of Artificial Sequence: Synthetic oligonucleotide
  Antisense strand to SEQ ID NO: 2579272
aagcguauagcagacuucu

SEQ ID NO: 2579274 - RNA, 19 nt, Artificial Sequence
  Description of Artificial Sequence: Synthetic oligonucleotide
  Sense strand starting at position 3251 of SEQ ID NO: 1889113
cugcuauacgcuuggaaac

SEQ ID NO: 2579275 - RNA, 19 nt, Artificial Sequence
  Description of Artificial Sequence: Synthetic oligonucleotide
  Antisense strand to SEQ ID NO: 2579274
guuuccaagcguauagcag

SEQ ID NO: 2579276 - RNA, 19 nt, Artificial Sequence
  Description of Artificial Sequence: Synthetic oligonucleotide
  Sense strand starting at position 154 of SEQ ID NO: 1889114
cagauauggucucccuaug

SEQ ID NO: 2579277 - RNA, 19 nt, Artificial Sequence
  Description of Artificial Sequence: Synthetic oligonucleotide
  Antisense strand to SEQ ID NO: 2579276
cauagggagaccauaucug

SEQ ID NO: 2579278 - RNA, 19 nt, Artificial Sequence
  Description of Artificial Sequence: Synthetic oligonucleotide
  Sense strand starting at position 271 of SEQ ID NO: 1889114
ucccuuuaucuguacugga

SEQ ID NO: 2579279 - RNA, 19 nt, Artificial Sequence
  Description of Artificial Sequence: Synthetic oligonucleotide
  Antisense strand to SEQ ID NO: 2579278
uccaguacagauaaaggga

SEQ ID NO: 2579280 - RNA, 19 nt, Artificial Sequence
  Description of Artificial Sequence: Synthetic oligonucleotide
  Sense strand starting at position 424 of SEQ ID NO: 1889114
gggaauagccaaugcuauu

SEQ ID NO: 2579281 - RNA, 19 nt, Artificial Sequence
  Description of Artificial Sequence: Synthetic oligonucleotide
  Antisense strand to SEQ ID NO: 2579280
aauagcauuggcuauuccc

SEQ ID NO: 2579282 - RNA, 19 nt, Artificial Sequence
  Description of Artificial Sequence: Synthetic oligonucleotide
  Sense strand starting at position 436 of SEQ ID NO: 1889114
ugcuauuccgaagaaacaa

SEQ ID NO: 2579283 - RNA, 19 nt, Artificial Sequence
  Description of Artificial Sequence: Synthetic oligonucleotide
  Antisense strand to SEQ ID NO: 2579282
uuguuucuucggaauagca

SEQ ID NO: 2579284 - RNA, 19 nt, Artificial Sequence
  Description of Artificial Sequence: Synthetic oligonucleotide
  Sense strand starting at position 794 of SEQ ID NO: 1889114
ggaaauaaauccucgucac

SEQ ID NO: 2579285 - RNA, 19 nt, Artificial Sequence
  Description of Artificial Sequence: Synthetic oligonucleotide
  Antisense strand to SEQ ID NO: 2579284
gugacgaggauuuauuucc

SEQ ID NO: 2579286 - RNA, 19 nt, Artificial Sequence
  Description of Artificial Sequence: Synthetic oligonucleotide
  Sense strand starting at position 795 of SEQ ID NO: 1889114
gaaauaaauccucgucacg

SEQ ID NO: 2579287 - RNA, 19 nt, Artificial Sequence
  Description of Artificial Sequence: Synthetic oligonucleotide
  Antisense strand to SEQ ID NO: 2579286
cgugacgaggauuuauuuc

SEQ ID NO: 2579288 - RNA, 19 nt, Artificial Sequence
  Description of Artificial Sequence: Synthetic oligonucleotide
  Sense strand starting at position 840 of SEQ ID NO: 1889114
ugggaagccgcguggauuu

SEQ ID NO: 2579289 - RNA, 19 nt, Artificial Sequence
  Description of Artificial Sequence: Synthetic oligonucleotide
  Antisense strand to SEQ ID NO: 2579288
aaauccacgcggcuuccca

SEQ ID NO: 2579290 - RNA, 19 nt, Artificial Sequence
  Description of Artificial Sequence: Synthetic oligonucleotide
  Sense strand starting at position 2230 of SEQ ID NO: 1889114
gguuucuagguuuggacau

SEQ ID NO: 2579291 - RNA, 19 nt, Artificial Sequence
  Description of Artificial Sequence: Synthetic oligonucleotide
  Antisense strand to SEQ ID NO: 2579290
auguccaaaccuagaaacc

SEQ ID NO: 2579292 - RNA, 19 nt, Artificial Sequence
  Description of Artificial Sequence: Synthetic oligonucleotide
  Sense strand starting at position 2278 of SEQ ID NO: 1889114
aauguuugcgaugacuuaa

SEQ ID NO: 2579293 - RNA, 19 nt, Artificial Sequence
  Description of Artificial Sequence: Synthetic oligonucleotide
  Antisense strand to SEQ ID NO: 2579292
uuaagucaucgcaaacauu

SEQ ID NO: 2579294 - RNA, 19 nt, Artificial Sequence
  Description of Artificial Sequence: Synthetic oligonucleotide
  Sense strand starting at position 2583 of SEQ ID NO: 1889114
acaauucgugaaugagaua

SEQ ID NO: 2579295 - RNA, 19 nt, Artificial Sequence
  Description of Artificial Sequence: Synthetic oligonucleotide
  Antisense strand to SEQ ID NO: 2579294
uaucucauucacgaauugu

SEQ ID NO: 2579296 - RNA, 19 nt, Artificial Sequence
  Description of Artificial Sequence: Synthetic oligonucleotide
  Sense strand starting at position 2656 of SEQ ID NO: 1889114
gcaugaguugaaggcauga

SEQ ID NO: 2579297 - RNA, 19 nt, Artificial Sequence
  Description of Artificial Sequence: Synthetic oligonucleotide
  Antisense strand to SEQ ID NO: 2579296
ucaugccuucaacucaugc

SEQ ID NO: 2579298 - RNA, 19 nt, Artificial Sequence
  Description of Artificial Sequence: Synthetic oligonucleotide
  Sense strand starting at position 2678 of SEQ ID NO: 1889114
ggccaaugcauguaugaag

SEQ ID NO: 2579299 - RNA, 19 nt, Artificial Sequence
  Description of Artificial Sequence: Synthetic oligonucleotide
  Antisense strand to SEQ ID NO: 2579298
cuucauacaugcauuggcc

SEQ ID NO: 2579300 - RNA, 19 nt, Artificial Sequence
  Description of Artificial Sequence: Synthetic oligonucleotide
  Sense strand starting at position 2723 of SEQ ID NO: 1889114
aggagugacuguguggaaa

SEQ ID NO: 2579301 - RNA, 19 nt, Artificial Sequence
  Description of Artificial Sequence: Synthetic oligonucleotide
  Antisense strand to SEQ ID NO: 2579300
uuuccacacagucacuccu

SEQ ID NO: 2579302 - RNA, 19 nt, Artificial Sequence
  Description of Artificial Sequence: Synthetic oligonucleotide
  Sense strand starting at position 2843 of SEQ ID NO: 1889114
acaugcauagugcaugaau

SEQ ID NO: 2579303 - RNA, 19 nt, Artificial Sequence
  Description of Artificial Sequence: Synthetic oligonucleotide
  Antisense strand to SEQ ID NO: 2579302
auucaugcacuaugcaugu

SEQ ID NO: 2579304 - RNA, 19 nt, Artificial Sequence
  Description of Artificial Sequence: Synthetic oligonucleotide
  Sense strand starting at position 2846 of SEQ ID NO: 1889114
ugcauagugcaugaauuag

SEQ ID NO: 2579305 - RNA, 19 nt, Artificial Sequence
  Description of Artificial Sequence: Synthetic oligonucleotide
  Antisense strand to SEQ ID NO: 2579304
cuaauucaugcacuaugca

SEQ ID NO: 2579306 - RNA, 19 nt, Artificial Sequence
  Description of Artificial Sequence: Synthetic oligonucleotide
  Sense strand starting at position 2852 of SEQ ID NO: 1889114
gugcaugaauuagugaaag

SEQ ID NO: 2579307 - RNA, 19 nt, Artificial Sequence
  Description of Artificial Sequence: Synthetic oligonucleotide
  Antisense strand to SEQ ID NO: 2579306
cuuucacuaauucaugcac

SEQ ID NO: 2579308 - RNA, 19 nt, Artificial Sequence
  Description of Artificial Sequence: Synthetic oligonucleotide
  Sense strand starting at position 2877 of SEQ ID NO: 1889114
ucauguaugcaugaguaaa

SEQ ID NO: 2579309 - RNA, 19 nt, Artificial Sequence
  Description of Artificial Sequence: Synthetic oligonucleotide
  Antisense strand to SEQ ID NO: 2579308
uuuacucaugcauacauga

SEQ ID NO: 2579310 - RNA, 19 nt, Artificial Sequence
  Description of Artificial Sequence: Synthetic oligonucleotide
  Sense strand starting at position 2879 of SEQ ID NO: 1889114
auguaugcaugaguaaaca

SEQ ID NO: 2579311 - RNA, 19 nt, Artificial Sequence
  Description of Artificial Sequence: Synthetic oligonucleotide
  Antisense strand to SEQ ID NO: 2579310
uguuuacucaugcauacau

SEQ ID NO: 2579312 - RNA, 19 nt, Artificial Sequence
  Description of Artificial Sequence: Synthetic oligonucleotide
  Sense strand starting at position 2923 of SEQ ID NO: 1889114
gugcaugaaugagugaaca

SEQ ID NO: 2579313 - RNA, 19 nt, Artificial Sequence
  Description of Artificial Sequence: Synthetic oligonucleotide
  Antisense strand to SEQ ID NO: 2579312
uguucacucauucaugcac

SEQ ID NO: 2579314 - RNA, 19 nt, Artificial Sequence
  Description of Artificial Sequence: Synthetic oligonucleotide
  Sense strand starting at position 2954 of SEQ ID NO: 1889114
agugauugagugcaugaau

SEQ ID NO: 2579315 - RNA, 19 nt, Artificial Sequence
  Description of Artificial Sequence: Synthetic oligonucleotide
  Antisense strand to SEQ ID NO: 2579314
auucaugcacucaaucacu

SEQ ID NO: 2579316 - RNA, 19 nt, Artificial Sequence
  Description of Artificial Sequence: Synthetic oligonucleotide
  Sense strand starting at position 2963 of SEQ ID NO: 1889114
gugcaugaaugacuuaagu

SEQ ID NO: 2579317 - RNA, 19 nt, Artificial Sequence
  Description of Artificial Sequence: Synthetic oligonucleotide
  Antisense strand to SEQ ID NO: 2579316
acuuaagucauucaugcac

SEQ ID NO: 2579318 - RNA, 19 nt, Artificial Sequence
  Description of Artificial Sequence: Synthetic oligonucleotide
  Sense strand starting at position 2990 of SEQ ID NO: 1889114
gcuuguguaagugcaugua

SEQ ID NO: 2579319 - RNA, 19 nt, Artificial Sequence
  Description of Artificial Sequence: Synthetic oligonucleotide
  Antisense strand to SEQ ID NO: 2579318
uacaugcacuuacacaagc

SEQ ID NO: 2579320 - RNA, 19 nt, Artificial Sequence
  Description of Artificial Sequence: Synthetic oligonucleotide
  Sense strand starting at position 3004 of SEQ ID NO: 1889114
auguaugaguaagugaaca

SEQ ID NO: 2579321 - RNA, 19 nt, Artificial Sequence
  Description of Artificial Sequence: Synthetic oligonucleotide
  Antisense strand to SEQ ID NO: 2579320
uguucacuuacucauacau

SEQ ID NO: 2579322 - RNA, 19 nt, Artificial Sequence
  Description of Artificial Sequence: Synthetic oligonucleotide
  Sense strand starting at position 3079 of SEQ ID NO: 1889114
uaugcuugagugcaugaau

SEQ ID NO: 2579323 - RNA, 19 nt, Artificial Sequence
  Description of Artificial Sequence: Synthetic oligonucleotide
  Antisense strand to SEQ ID NO: 2579322
auucaugcacucaagcaua

SEQ ID NO: 2579324 - RNA, 19 nt, Artificial Sequence
  Description of Artificial Sequence: Synthetic oligonucleotide
  Sense strand starting at position 3130 of SEQ ID NO: 1889114
gaguguaugaacgaguaac

SEQ ID NO: 2579325 - RNA, 19 nt, Artificial Sequence
  Description of Artificial Sequence: Synthetic oligonucleotide
  Antisense strand to SEQ ID NO: 2579324
guuacucguucauacacuc

SEQ ID NO: 2579326 - RNA, 19 nt, Artificial Sequence
  Description of Artificial Sequence: Synthetic oligonucleotide
  Sense strand starting at position 3178 of SEQ ID NO: 1889114
acgugaaugacugagugaa

SEQ ID NO: 2579327 - RNA, 19 nt, Artificial Sequence
  Description of Artificial Sequence: Synthetic oligonucleotide
  Antisense strand to SEQ ID NO: 2579326
uucacucagucauucacgu

SEQ ID NO: 2579328 - RNA, 19 nt, Artificial Sequence
  Description of Artificial Sequence: Synthetic oligonucleotide
  Sense strand starting at position 3180 of SEQ ID NO: 1889114
gugaaugacugagugaaca

SEQ ID NO: 2579329 - RNA, 19 nt, Artificial Sequence
  Description of Artificial Sequence: Synthetic oligonucleotide
  Antisense strand to SEQ ID NO: 2579328
uguucacucagucauucac

SEQ ID NO: 2579330 - RNA, 19 nt, Artificial Sequence
  Description of Artificial Sequence: Synthetic oligonucleotide
  Sense strand starting at position 3415 of SEQ ID NO: 1889114
acgagugaaugagugaaga

SEQ ID NO: 2579331 - RNA, 19 nt, Artificial Sequence
  Description of Artificial Sequence: Synthetic oligonucleotide
  Antisense strand to SEQ ID NO: 2579330
ucuucacucauucacucgu

SEQ ID NO: 2579332 - RNA, 19 nt, Artificial Sequence
  Description of Artificial Sequence: Synthetic oligonucleotide
  Sense strand starting at position 3496 of SEQ ID NO: 1889114
caaguuaauggaugcauga

SEQ ID NO: 2579333 - RNA, 19 nt, Artificial Sequence
  Description of Artificial Sequence: Synthetic oligonucleotide
  Antisense strand to SEQ ID NO: 2579332
ucaugcauccauuaacuug

SEQ ID NO: 2579334 - RNA, 19 nt, Artificial Sequence
  Description of Artificial Sequence: Synthetic oligonucleotide
  Sense strand starting at position 3562 of SEQ ID NO: 1889114
ugaaucaaugaauguguga

SEQ ID NO: 2579335 - RNA, 19 nt, Artificial Sequence
  Description of Artificial Sequence: Synthetic oligonucleotide
  Antisense strand to SEQ ID NO: 2579334
ucacacauucauugauuca

SEQ ID NO: 2579336 - RNA, 19 nt, Artificial Sequence
  Description of Artificial Sequence: Synthetic oligonucleotide
  Sense strand starting at position 3599 of SEQ ID NO: 1889114
acaugaguugaaugaguga

SEQ ID NO: 2579337 - RNA, 19 nt, Artificial Sequence
  Description of Artificial Sequence: Synthetic oligonucleotide
  Antisense strand to SEQ ID NO: 2579336
ucacucauucaacucaugu

SEQ ID NO: 2579338 - RNA, 19 nt, Artificial Sequence
  Description of Artificial Sequence: Synthetic oligonucleotide
  Sense strand starting at position 3602 of SEQ ID NO: 1889114
ugaguugaaugagugauga

SEQ ID NO: 2579339 - RNA, 19 nt, Artificial Sequence
  Description of Artificial Sequence: Synthetic oligonucleotide
  Antisense strand to SEQ ID NO: 2579338
ucaucacucauucaacuca

SEQ ID NO: 2579340 - RNA, 19 nt, Artificial Sequence
  Description of Artificial Sequence: Synthetic oligonucleotide
  Sense strand starting at position 3610 of SEQ ID NO: 1889114
augagugaugauuguguga

SEQ ID NO: 2579341 - RNA, 19 nt, Artificial Sequence
  Description of Artificial Sequence: Synthetic oligonucleotide
  Antisense strand to SEQ ID NO: 2579340
ucacacaaucaucacucau

SEQ ID NO: 2579342 - RNA, 19 nt, Artificial Sequence
  Description of Artificial Sequence: Synthetic oligonucleotide
  Sense strand starting at position 3613 of SEQ ID NO: 1889114
agugaugauugugugaaug

SEQ ID NO: 2579343 - RNA, 19 nt, Artificial Sequence
  Description of Artificial Sequence: Synthetic oligonucleotide
  Antisense strand to SEQ ID NO: 2579342
cauucacacaaucaucacu

SEQ ID NO: 2579344 - RNA, 19 nt, Artificial Sequence
  Description of Artificial Sequence: Synthetic oligonucleotide
  Sense strand starting at position 3643 of SEQ ID NO: 1889114
gagugcaugaguuaaguga

SEQ ID NO: 2579345 - RNA, 19 nt, Artificial Sequence
  Description of Artificial Sequence: Synthetic oligonucleotide
  Antisense strand to SEQ ID NO: 2579344
ucacuuaacucaugcacuc

SEQ ID NO: 2579346 - RNA, 19 nt, Artificial Sequence
  Description of Artificial Sequence: Synthetic oligonucleotide
  Sense strand starting at position 3647 of SEQ ID NO: 1889114
gcaugaguuaagugaauaa

SEQ ID NO: 2579347 - RNA, 19 nt, Artificial Sequence
  Description of Artificial Sequence: Synthetic oligonucleotide
  Antisense strand to SEQ ID NO: 2579346
uuauucacuuaacucaugc

SEQ ID NO: 2579348 - RNA, 19 nt, Artificial Sequence
  Description of Artificial Sequence: Synthetic oligonucleotide
  Sense strand starting at position 3668 of SEQ ID NO: 1889114
gagaaacccugcucuguag

SEQ ID NO: 2579349 - RNA, 19 nt, Artificial Sequence
  Description of Artificial Sequence: Synthetic oligonucleotide
  Antisense strand to SEQ ID NO: 2579348
cuacagagcaggguuucuc

SEQ ID NO: 2579350 - RNA, 19 nt, Artificial Sequence
  Description of Artificial Sequence: Synthetic oligonucleotide
  Sense strand starting at position 3811 of SEQ ID NO: 1889114
guuuccagguauucccaaa

SEQ ID NO: 2579351 - RNA, 19 nt, Artificial Sequence
  Description of Artificial Sequence: Synthetic oligonucleotide
  Antisense strand to SEQ ID NO: 2579350
uuugggaauaccuggaaac

SEQ ID NO: 2579352 - RNA, 19 nt, Artificial Sequence
  Description of Artificial Sequence: Synthetic oligonucleotide
  Sense strand starting at position 3833 of SEQ ID NO: 1889114
cagugacaguugucacaau

SEQ ID NO: 2579353 - RNA, 19 nt, Artificial Sequence
  Description of Artificial Sequence: Synthetic oligonucleotide
  Antisense strand to SEQ ID NO: 2579352
auugugacaacugucacug

SEQ ID NO: 2579354 - RNA, 19 nt, Artificial Sequence
  Description of Artificial Sequence: Synthetic oligonucleotide
  Sense strand starting at position 3887 of SEQ ID NO: 1889114
aggauagauucugucagcu

SEQ ID NO: 2579355 - RNA, 19 nt, Artificial Sequence
  Description of Artificial Sequence: Synthetic oligonucleotide
  Antisense strand to SEQ ID NO: 2579354
agcugacagaaucuauccu

SEQ ID NO: 2579356 - RNA, 19 nt, Artificial Sequence
  Description of Artificial Sequence: Synthetic oligonucleotide
  Sense strand starting at position 1061 of SEQ ID NO: 1889115
uaagaaugugcuuauugug

SEQ ID NO: 2579357 - RNA, 19 nt, Artificial Sequence
  Description of Artificial Sequence: Synthetic oligonucleotide
  Antisense strand to SEQ ID NO: 2579356
cacaauaagcacauucuua

SEQ ID NO: 2579358 - RNA, 19 nt, Artificial Sequence
  Description of Artificial Sequence: Synthetic oligonucleotide
  Sense strand starting at position 1094 of SEQ ID NO: 1889115
uuguuaagcccucaaguga

SEQ ID NO: 2579359 - RNA, 19 nt, Artificial Sequence
  Description of Artificial Sequence: Synthetic oligonucleotide
  Antisense strand to SEQ ID NO: 2579358
ucacuugagggcuuaacaa

SEQ ID NO: 2579360 - RNA, 19 nt, Artificial Sequence
  Description of Artificial Sequence: Synthetic oligonucleotide
  Sense strand starting at position 1323 of SEQ ID NO: 1889115
uuuacugauguacaaagua

SEQ ID NO: 2579361 - RNA, 19 nt, Artificial Sequence
  Description of Artificial Sequence: Synthetic oligonucleotide
  Antisense strand to SEQ ID NO: 2579360
uacuuuguacaucaguaaa

SEQ ID NO: 2579362 - RNA, 19 nt, Artificial Sequence
  Description of Artificial Sequence: Synthetic oligonucleotide
  Sense strand starting at position 2110 of SEQ ID NO: 1889115
ugagaaauguauccaguga

SEQ ID NO: 2579363 - RNA, 19 nt, Artificial Sequence
  Description of Artificial Sequence: Synthetic oligonucleotide
  Antisense strand to SEQ ID NO: 2579362
ucacuggauacauuucuca

SEQ ID NO: 2579364 - RNA, 19 nt, Artificial Sequence
  Description of Artificial Sequence: Synthetic oligonucleotide
  Sense strand starting at position 2266 of SEQ ID NO: 1889115
acuagauuggugugaggag

SEQ ID NO: 2579365 - RNA, 19 nt, Artificial Sequence
  Description of Artificial Sequence: Synthetic oligonucleotide
  Antisense strand to SEQ ID NO: 2579364
cuccucacaccaaucuagu

SEQ ID NO: 2579366 - RNA, 19 nt, Artificial Sequence
  Description of Artificial Sequence: Synthetic oligonucleotide
  Sense strand starting at position 2282 of SEQ ID NO: 1889115
gagcacaaggccuaguaau

SEQ ID NO: 2579367 - RNA, 19 nt, Artificial Sequence
  Description of Artificial Sequence: Synthetic oligonucleotide
  Antisense strand to SEQ ID NO: 2579366
auuacuaggccuugugcuc

SEQ ID NO: 2579368 - RNA, 19 nt, Artificial Sequence
  Description of Artificial Sequence: Synthetic oligonucleotide
  Sense strand starting at position 2483 of SEQ ID NO: 1889115
guauaauagauauggaguu

SEQ ID NO: 2579369 - RNA, 19 nt, Artificial Sequence
  Description of Artificial Sequence: Synthetic oligonucleotide
  Antisense strand to SEQ ID NO: 2579368
aacuccauaucuauuauac

SEQ ID NO: 2579370 - RNA, 19 nt, Artificial Sequence
  Description of Artificial Sequence: Synthetic oligonucleotide
  Sense strand starting at position 2526 of SEQ ID NO: 1889115
aggaacuauugauagauga

SEQ ID NO: 2579371 - RNA, 19 nt, Artificial Sequence
  Description of Artificial Sequence: Synthetic oligonucleotide
  Antisense strand to SEQ ID NO: 2579370
ucaucuaucaauaguuccu

SEQ ID NO: 2579372 - RNA, 19 nt, Artificial Sequence
  Description of Artificial Sequence: Synthetic oligonucleotide
  Sense strand starting at position 2536 of SEQ ID NO: 1889115
gauagaugaugaucguaug

SEQ ID NO: 2579373 - RNA, 19 nt, Artificial Sequence
  Description of Artificial Sequence: Synthetic oligonucleotide
  Antisense strand to SEQ ID NO: 2579372
cauacgaucaucaucuauc

SEQ ID NO: 2579374 - RNA, 19 nt, Artificial Sequence
  Description of Artificial Sequence: Synthetic oligonucleotide
  Sense strand starting at position 2537 of SEQ ID NO: 1889115
auagaugaugaucguauga

SEQ ID NO: 2579375 - RNA, 19 nt, Artificial Sequence
  Description of Artificial Sequence: Synthetic oligonucleotide
  Antisense strand to SEQ ID NO: 2579374
ucauacgaucaucaucuau

SEQ ID NO: 2579376 - RNA, 19 nt, Artificial Sequence
  Description of Artificial Sequence: Synthetic oligonucleotide
  Sense strand starting at position 2686 of SEQ ID NO: 1889115
cguuauauuuaugcauauc

SEQ ID NO: 2579377 - RNA, 19 nt, Artificial Sequence
  Description of Artificial Sequence: Synthetic oligonucleotide
  Antisense strand to SEQ ID NO: 2579376
gauaugcauaaauauaacg

SEQ ID NO: 2579378 - RNA, 19 nt, Artificial Sequence
  Description of Artificial Sequence: Synthetic oligonucleotide
  Sense strand starting at position 2746 of SEQ ID NO: 1889115
gauuuaauuugguaugucu

SEQ ID NO: 2579379 - RNA, 19 nt, Artificial Sequence
  Description of Artificial Sequence: Synthetic oligonucleotide
  Antisense strand to SEQ ID NO: 2579378
agacauaccaaauuaaauc

SEQ ID NO: 2579380 - RNA, 19 nt, Artificial Sequence
  Description of Artificial Sequence: Synthetic oligonucleotide
  Sense strand starting at position 2753 of SEQ ID NO: 1889115
uuugguaugucucuaaaua

SEQ ID NO: 2579381 - RNA, 19 nt, Artificial Sequence
  Description of Artificial Sequence: Synthetic oligonucleotide
  Antisense strand to SEQ ID NO: 2579380
uauuuagagacauaccaaa

SEQ ID NO: 2579382 - RNA, 19 nt, Artificial Sequence
  Description of Artificial Sequence: Synthetic oligonucleotide
  Sense strand starting at position 2754 of SEQ ID NO: 1889115
uugguaugucucuaaauau

SEQ ID NO: 2579383 - RNA, 19 nt, Artificial Sequence
  Description of Artificial Sequence: Synthetic oligonucleotide
  Antisense strand to SEQ ID NO: 2579382
auauuuagagacauaccaa

SEQ ID NO: 2579384 - RNA, 19 nt, Artificial Sequence
  Description of Artificial Sequence: Synthetic oligonucleotide
  Sense strand starting at position 2809 of SEQ ID NO: 1889115
gggugacuuacuuguaagg

SEQ ID NO: 2579385 - RNA, 19 nt, Artificial Sequence
  Description of Artificial Sequence: Synthetic oligonucleotide
  Antisense strand to SEQ ID NO: 2579384
ccuuacaaguaagucaccc

SEQ ID NO: 2579386 - RNA, 19 nt, Artificial Sequence
  Description of Artificial Sequence: Synthetic oligonucleotide
  Sense strand starting at position 2910 of SEQ ID NO: 1889115
gugucuaagcagcauauuu

SEQ ID NO: 2579387 - RNA, 19 nt, Artificial Sequence
  Description of Artificial Sequence: Synthetic oligonucleotide
  Antisense strand to SEQ ID NO: 2579386
aaauaugcugcuuagacac

SEQ ID NO: 2579388 - RNA, 19 nt, Artificial Sequence
  Description of Artificial Sequence: Synthetic oligonucleotide
  Sense strand starting at position 2981 of SEQ ID NO: 1889115
aggaauaaucuuugugcca

SEQ ID NO: 2579389 - RNA, 19 nt, Artificial Sequence
  Description of Artificial Sequence: Synthetic oligonucleotide
  Antisense strand to SEQ ID NO: 2579388
uggcacaaagauuauuccu

SEQ ID NO: 2579390 - RNA, 19 nt, Artificial Sequence
  Description of Artificial Sequence: Synthetic oligonucleotide
  Sense strand starting at position 2982 of SEQ ID NO: 1889115
ggaauaaucuuugugccau

SEQ ID NO: 2579391 - RNA, 19 nt, Artificial Sequence
  Description of Artificial Sequence: Synthetic oligonucleotide
  Antisense strand to SEQ ID NO: 2579390
auggcacaaagauuauucc

SEQ ID NO: 2579392 - RNA, 19 nt, Artificial Sequence
  Description of Artificial Sequence: Synthetic oligonucleotide
  Sense strand starting at position 3105 of SEQ ID NO: 1889115
augguugacaguugguaua

SEQ ID NO: 2579393 - RNA, 19 nt, Artificial Sequence
  Description of Artificial Sequence: Synthetic oligonucleotide
  Antisense strand to SEQ ID NO: 2579392
uauaccaacugucaaccau

SEQ ID NO: 2579394 - RNA, 19 nt, Artificial Sequence
  Description of Artificial Sequence: Synthetic oligonucleotide
  Sense strand starting at position 3107 of SEQ ID NO: 1889115
gguugacaguugguauauu

SEQ ID NO: 2579395 - RNA, 19 nt, Artificial Sequence
  Description of Artificial Sequence: Synthetic oligonucleotide
  Antisense strand to SEQ ID NO: 2579394
aauauaccaacugucaacc

SEQ ID NO: 2579396 - RNA, 19 nt, Artificial Sequence
  Description of Artificial Sequence: Synthetic oligonucleotide
  Sense strand starting at position 3129 of SEQ ID NO: 1889115
auucgaacuccuuagcauu

SEQ ID NO: 2579397 - RNA, 19 nt, Artificial Sequence
  Description of Artificial Sequence: Synthetic oligonucleotide
  Antisense strand to SEQ ID NO: 2579396
aaugcuaaggaguucgaau

SEQ ID NO: 2579398 - RNA, 19 nt, Artificial Sequence
  Description of Artificial Sequence: Synthetic oligonucleotide
  Sense strand starting at position 3146 of SEQ ID NO: 1889115
uugguaaguguugaauaug

SEQ ID NO: 2579399 - RNA, 19 nt, Artificial Sequence
  Description of Artificial Sequence: Synthetic oligonucleotide
  Antisense strand to SEQ ID NO: 2579398
cauauucaacacuuaccaa

SEQ ID NO: 2579400 - RNA, 19 nt, Artificial Sequence
  Description of Artificial Sequence: Synthetic oligonucleotide
  Sense strand starting at position 3149 of SEQ ID NO: 1889115
guaaguguugaauaugugu

SEQ ID NO: 2579401 - RNA, 19 nt, Artificial Sequence
  Description of Artificial Sequence: Synthetic oligonucleotide
  Antisense strand to SEQ ID NO: 2579400
acacauauucaacacuuac

SEQ ID NO: 2579402 - RNA, 19 nt, Artificial Sequence
  Description of Artificial Sequence: Synthetic oligonucleotide
  Sense strand starting at position 3154 of SEQ ID NO: 1889115
uguugaauauguguggaag

SEQ ID NO: 2579403 - RNA, 19 nt, Artificial Sequence
  Description of Artificial Sequence: Synthetic oligonucleotide
  Antisense strand to SEQ ID NO: 2579402
cuuccacacauauucaaca

SEQ ID NO: 2579404 - RNA, 19 nt, Artificial Sequence
  Description of Artificial Sequence: Synthetic oligonucleotide
  Sense strand starting at position 3155 of SEQ ID NO: 1889115
guugaauauguguggaaga

SEQ ID NO: 2579405 - RNA, 19 nt, Artificial Sequence
  Description of Artificial Sequence: Synthetic oligonucleotide
  Antisense strand to SEQ ID NO: 2579404
ucuuccacacauauucaac

SEQ ID NO: 2579406 - RNA, 19 nt, Artificial Sequence
  Description of Artificial Sequence: Synthetic oligonucleotide
  Sense strand starting at position 3188 of SEQ ID NO: 1889115
ugauauuucucauacugua

SEQ ID NO: 2579407 - RNA, 19 nt, Artificial Sequence
  Description of Artificial Sequence: Synthetic oligonucleotide
  Antisense strand to SEQ ID NO: 2579406
uacaguaugagaaauauca

SEQ ID NO: 2579408 - RNA, 19 nt, Artificial Sequence
  Description of Artificial Sequence: Synthetic oligonucleotide
  Sense strand starting at position 3251 of SEQ ID NO: 1889115
auugccuugguuuaauaua

SEQ ID NO: 2579409 - RNA, 19 nt, Artificial Sequence
  Description of Artificial Sequence: Synthetic oligonucleotide
  Antisense strand to SEQ ID NO: 2579408
uauauuaaaccaaggcaau

SEQ ID NO: 2579410 - RNA, 19 nt, Artificial Sequence
  Description of Artificial Sequence: Synthetic oligonucleotide
  Sense strand starting at position 3259 of SEQ ID NO: 1889115
gguuuaauauaguuuaggu

SEQ ID NO: 2579411 - RNA, 19 nt, Artificial Sequence
  Description of Artificial Sequence: Synthetic oligonucleotide
  Antisense strand to SEQ ID NO: 2579410
accuaaacuauauuaaacc

SEQ ID NO: 2579412 - RNA, 19 nt, Artificial Sequence
  Description of Artificial Sequence: Synthetic oligonucleotide
  Sense strand starting at position 3350 of SEQ ID NO: 1889115
aucaguaaacucugugaag

SEQ ID NO: 2579413 - RNA, 19 nt, Artificial Sequence
  Description of Artificial Sequence: Synthetic oligonucleotide
  Antisense strand to SEQ ID NO: 2579412
cuucacagaguuuacugau

SEQ ID NO: 2579414 - RNA, 19 nt, Artificial Sequence
  Description of Artificial Sequence: Synthetic oligonucleotide
  Sense strand starting at position 3351 of SEQ ID NO: 1889115
ucaguaaacucugugaaga

SEQ ID NO: 2579415 - RNA, 19 nt, Artificial Sequence
  Description of Artificial Sequence: Synthetic oligonucleotide
  Antisense strand to SEQ ID NO: 2579414
ucuucacagaguuuacuga

SEQ ID NO: 2579416 - RNA, 19 nt, Artificial Sequence
  Description of Artificial Sequence: Synthetic oligonucleotide
  Sense strand starting at position 3352 of SEQ ID NO: 1889115
caguaaacucugugaagau

SEQ ID NO: 2579417 - RNA, 19 nt, Artificial Sequence
  Description of Artificial Sequence: Synthetic oligonucleotide
  Antisense strand to SEQ ID NO: 2579416
aucuucacagaguuuacug

SEQ ID NO: 2579418 - RNA, 19 nt, Artificial Sequence
  Description of Artificial Sequence: Synthetic oligonucleotide
  Sense strand starting at position 3592 of SEQ ID NO: 1889115
auaggagaaucagaagaca

SEQ ID NO: 2579419 - RNA, 19 nt, Artificial Sequence
  Description of Artificial Sequence: Synthetic oligonucleotide
  Antisense strand to SEQ ID NO: 2579418
ugucuucugauucuccuau

SEQ ID NO: 2579420 - RNA, 19 nt, Artificial Sequence
  Description of Artificial Sequence: Synthetic oligonucleotide
  Sense strand starting at position 3627 of SEQ ID NO: 1889115
aggauaaucuaagacaaau

SEQ ID NO: 2579421 - RNA, 19 nt, Artificial Sequence
  Description of Artificial Sequence: Synthetic oligonucleotide
  Antisense strand to SEQ ID NO: 2579420
auuugucuuagauuauccu

SEQ ID NO: 2579422 - RNA, 19 nt, Artificial Sequence
  Description of Artificial Sequence: Synthetic oligonucleotide
  Sense strand starting at position 3639 of SEQ ID NO: 1889115
gacaaauuguggcugagca

SEQ ID NO: 2579423 - RNA, 19 nt, Artificial Sequence
  Description of Artificial Sequence: Synthetic oligonucleotide
  Antisense strand to SEQ ID NO: 2579422
ugcucagccacaauuuguc

SEQ ID NO: 2579424 - RNA, 19 nt, Artificial Sequence
  Description of Artificial Sequence: Synthetic oligonucleotide
  Sense strand starting at position 3641 of SEQ ID NO: 1889115
caaauuguggcugagcauu

SEQ ID NO: 2579425 - RNA, 19 nt, Artificial Sequence
  Description of Artificial Sequence: Synthetic oligonucleotide
  Antisense strand to SEQ ID NO: 2579424
aaugcucagccacaauuug

SEQ ID NO: 2579426 - RNA, 19 nt, Artificial Sequence
  Description of Artificial Sequence: Synthetic oligonucleotide
  Sense strand starting at position 3666 of SEQ ID NO: 1889115
agcuaagauaggugacagu

SEQ ID NO: 2579427 - RNA, 19 nt, Artificial Sequence
  Description of Artificial Sequence: Synthetic oligonucleotide
  Antisense strand to SEQ ID NO: 2579426
acugucaccuaucuuagcu

SEQ ID NO: 2579428 - RNA, 19 nt, Artificial Sequence
  Description of Artificial Sequence: Synthetic oligonucleotide
  Sense strand starting at position 3692 of SEQ ID NO: 1889115
ggaagaaugccuuggugug

SEQ ID NO: 2579429 - RNA, 19 nt, Artificial Sequence
  Description of Artificial Sequence: Synthetic oligonucleotide
  Antisense strand to SEQ ID NO: 2579428
cacaccaaggcauucuucc

SEQ ID NO: 2579430 - RNA, 19 nt, Artificial Sequence
  Description of Artificial Sequence: Synthetic oligonucleotide
  Sense strand starting at position 3718 of SEQ ID NO: 1889115
ggagauggcucagcuaaag

SEQ ID NO: 2579431 - RNA, 19 nt, Artificial Sequence
  Description of Artificial Sequence: Synthetic oligonucleotide
  Antisense strand to SEQ ID NO: 2579430
cuuuagcugagccaucucc

SEQ ID NO: 2579432 - RNA, 19 nt, Artificial Sequence
  Description of Artificial Sequence: Synthetic oligonucleotide
  Sense strand starting at position 3854 of SEQ ID NO: 1889115
gaauaagaugucugucuga

SEQ ID NO: 2579433 - RNA, 19 nt, Artificial Sequence
  Description of Artificial Sequence: Synthetic oligonucleotide
  Antisense strand to SEQ ID NO: 2579432
ucagacagacaucuuauuc

SEQ ID NO: 2579434 - RNA, 19 nt, Artificial Sequence
  Description of Artificial Sequence: Synthetic oligonucleotide
  Sense strand starting at position 3857 of SEQ ID NO: 1889115
uaagaugucugucugaucu

SEQ ID NO: 2579435 - RNA, 19 nt, Artificial Sequence
  Description of Artificial Sequence: Synthetic oligonucleotide
  Antisense strand to SEQ ID NO: 2579434
agaucagacagacaucuua

SEQ ID NO: 2579436 - RNA, 19 nt, Artificial Sequence
  Description of Artificial Sequence: Synthetic oligonucleotide
  Sense strand starting at position 238 of SEQ ID NO: 1889116
auauuuguccaguggugau

SEQ ID NO: 2579437 - RNA, 19 nt, Artificial Sequence
  Description of Artificial Sequence: Synthetic oligonucleotide
  Antisense strand to SEQ ID NO: 2579436
aucaccacuggacaaauau

SEQ ID NO: 2579438 - RNA, 19 nt, Artificial Sequence
  Description of Artificial Sequence: Synthetic oligonucleotide
  Sense strand starting at position 262 of SEQ ID NO: 1889116
aagagcuagccuggaauga

SEQ ID NO: 2579439 - RNA, 19 nt, Artificial Sequence
  Description of Artificial Sequence: Synthetic oligonucleotide
  Antisense strand to SEQ ID NO: 2579438
ucauuccaggcuagcucuu

SEQ ID NO: 2579440 - RNA, 19 nt, Artificial Sequence
  Description of Artificial Sequence: Synthetic oligonucleotide
  Sense strand starting at position 437 of SEQ ID NO: 1889116
ggagauaugaugugguauu

SEQ ID NO: 2579441 - RNA, 19 nt, Artificial Sequence
  Description of Artificial Sequence: Synthetic oligonucleotide
  Antisense strand to SEQ ID NO: 2579440
aauaccacaucauaucucc

SEQ ID NO: 2579442 - RNA, 19 nt, Artificial Sequence
  Description of Artificial Sequence: Synthetic oligonucleotide
  Sense strand starting at position 525 of SEQ ID NO: 1889116
uaugaauaguggucaacug

SEQ ID NO: 2579443 - RNA, 19 nt, Artificial Sequence
  Description of Artificial Sequence: Synthetic oligonucleotide
  Antisense strand to SEQ ID NO: 2579442
caguugaccacuauucaua

SEQ ID NO: 2579444 - RNA, 19 nt, Artificial Sequence
  Description of Artificial Sequence: Synthetic oligonucleotide
  Sense strand starting at position 565 of SEQ ID NO: 1889116
uguugcaauuuguucugau

SEQ ID NO: 2579445 - RNA, 19 nt, Artificial Sequence
  Description of Artificial Sequence: Synthetic oligonucleotide
  Antisense strand to SEQ ID NO: 2579444
aucagaacaaauugcaaca

SEQ ID NO: 2579446 - RNA, 19 nt, Artificial Sequence
  Description of Artificial Sequence: Synthetic oligonucleotide
  Sense strand starting at position 566 of SEQ ID NO: 1889116
guugcaauuuguucugaug

SEQ ID NO: 2579447 - RNA, 19 nt, Artificial Sequence
  Description of Artificial Sequence: Synthetic oligonucleotide
  Antisense strand to SEQ ID NO: 2579446
caucagaacaaauugcaac

SEQ ID NO: 2579448 - RNA, 19 nt, Artificial Sequence
  Description of Artificial Sequence: Synthetic oligonucleotide
  Sense strand starting at position 661 of SEQ ID NO: 1889116
gacagaagauucccuuguu

SEQ ID NO: 2579449 - RNA, 19 nt, Artificial Sequence
  Description of Artificial Sequence: Synthetic oligonucleotide
  Antisense strand to SEQ ID NO: 2579448
aacaagggaaucuucuguc

SEQ ID NO: 2579450 - RNA, 19 nt, Artificial Sequence
  Description of Artificial Sequence: Synthetic oligonucleotide
  Sense strand starting at position 662 of SEQ ID NO: 1889116
acagaagauucccuuguua

SEQ ID NO: 2579451 - RNA, 19 nt, Artificial Sequence
  Description of Artificial Sequence: Synthetic oligonucleotide
  Antisense strand to SEQ ID NO: 2579450
uaacaagggaaucuucugu

SEQ ID NO: 2579452 - RNA, 19 nt, Artificial Sequence
  Description of Artificial Sequence: Synthetic oligonucleotide
  Sense strand starting at position 664 of SEQ ID NO: 1889116
agaagauucccuuguuaga

SEQ ID NO: 2579453 - RNA, 19 nt, Artificial Sequence
  Description of Artificial Sequence: Synthetic oligonucleotide
  Antisense strand to SEQ ID NO: 2579452
ucuaacaagggaaucuucu

SEQ ID NO: 2579454 - RNA, 19 nt, Artificial Sequence
  Description of Artificial Sequence: Synthetic oligonucleotide
  Sense strand starting at position 743 of SEQ ID NO: 1889116
gcagaauuaugauucucca

SEQ ID NO: 2579455 - RNA, 19 nt, Artificial Sequence
  Description of Artificial Sequence: Synthetic oligonucleotide
  Antisense strand to SEQ ID NO: 2579454
uggagaaucauaauucugc

SEQ ID NO: 2579456 - RNA, 19 nt, Artificial Sequence
  Description of Artificial Sequence: Synthetic oligonucleotide
  Sense strand starting at position 792 of SEQ ID NO: 1889116
ugaaaucuucguugaauaa

SEQ ID NO: 2579457 - RNA, 19 nt, Artificial Sequence
  Description of Artificial Sequence: Synthetic oligonucleotide
  Antisense strand to SEQ ID NO: 2579456
uuauucaacgaagauuuca

SEQ ID NO: 2579458 - RNA, 19 nt, Artificial Sequence
  Description of Artificial Sequence: Synthetic oligonucleotide
  Sense strand starting at position 796 of SEQ ID NO: 1889116
aucuucguugaauaaagua

SEQ ID NO: 2579459 - RNA, 19 nt, Artificial Sequence
  Description of Artificial Sequence: Synthetic oligonucleotide
  Antisense strand to SEQ ID NO: 2579458
uacuuuauucaacgaagau

SEQ ID NO: 2579460 - RNA, 19 nt, Artificial Sequence
  Description of Artificial Sequence: Synthetic oligonucleotide
  Sense strand starting at position 801 of SEQ ID NO: 1889116
cguugaauaaaguagauau

SEQ ID NO: 2579461 - RNA, 19 nt, Artificial Sequence
  Description of Artificial Sequence: Synthetic oligonucleotide
  Antisense strand to SEQ ID NO: 2579460
auaucuacuuuauucaacg

SEQ ID NO: 2579462 - RNA, 19 nt, Artificial Sequence
  Description of Artificial Sequence: Synthetic oligonucleotide
  Sense strand starting at position 811 of SEQ ID NO: 1889116
aguagauauaggugaagca

SEQ ID NO: 2579463 - RNA, 19 nt, Artificial Sequence
  Description of Artificial Sequence: Synthetic oligonucleotide
  Antisense strand to SEQ ID NO: 2579462
ugcuucaccuauaucuacu

SEQ ID NO: 2579464 - RNA, 19 nt, Artificial Sequence
  Description of Artificial Sequence: Synthetic oligonucleotide
  Sense strand starting at position 812 of SEQ ID NO: 1889116
guagauauaggugaagcau

SEQ ID NO: 2579465 - RNA, 19 nt, Artificial Sequence
  Description of Artificial Sequence: Synthetic oligonucleotide
  Antisense strand to SEQ ID NO: 2579464
augcuucaccuauaucuac

SEQ ID NO: 2579466 - RNA, 19 nt, Artificial Sequence
  Description of Artificial Sequence: Synthetic oligonucleotide
  Sense strand starting at position 1156 of SEQ ID NO: 1889116
guacauuuauuuggaauuc

SEQ ID NO: 2579467 - RNA, 19 nt, Artificial Sequence
  Description of Artificial Sequence: Synthetic oligonucleotide
  Antisense strand to SEQ ID NO: 2579466
gaauuccaaauaaauguac

SEQ ID NO: 2579468 - RNA, 19 nt, Artificial Sequence
  Description of Artificial Sequence: Synthetic oligonucleotide
  Sense strand starting at position 1322 of SEQ ID NO: 1889116
uuuacugauguacaaagua

SEQ ID NO: 2579469 - RNA, 19 nt, Artificial Sequence
  Description of Artificial Sequence: Synthetic oligonucleotide
  Antisense strand to SEQ ID NO: 2579468
uacuuuguacaucaguaaa

SEQ ID NO: 2579470 - RNA, 19 nt, Artificial Sequence
  Description of Artificial Sequence: Synthetic oligonucleotide
  Sense strand starting at position 1392 of SEQ ID NO: 1889116
uugcuuaagacagacgauu

SEQ ID NO: 2579471 - RNA, 19 nt, Artificial Sequence
  Description of Artificial Sequence: Synthetic oligonucleotide
  Antisense strand to SEQ ID NO: 2579470
aaucgucugucuuaagcaa

SEQ ID NO: 2579472 - RNA, 19 nt, Artificial Sequence
  Description of Artificial Sequence: Synthetic oligonucleotide
  Sense strand starting at position 1512 of SEQ ID NO: 1889116
auagcaucaguuugaaaua

SEQ ID NO: 2579473 - RNA, 19 nt, Artificial Sequence
  Description of Artificial Sequence: Synthetic oligonucleotide
  Antisense strand to SEQ ID NO: 2579472
uauuucaaacugaugcuau

SEQ ID NO: 2579474 - RNA, 19 nt, Artificial Sequence
  Description of Artificial Sequence: Synthetic oligonucleotide
  Sense strand starting at position 1650 of SEQ ID NO: 1889116
caaaguuuccugggaaagu

SEQ ID NO: 2579475 - RNA, 19 nt, Artificial Sequence
  Description of Artificial Sequence: Synthetic oligonucleotide
  Antisense strand to SEQ ID NO: 2579474
acuuucccaggaaacuuug

SEQ ID NO: 2579476 - RNA, 19 nt, Artificial Sequence
  Description of Artificial Sequence: Synthetic oligonucleotide
  Sense strand starting at position 1775 of SEQ ID NO: 1889116
aaucauugaccguaagucu

SEQ ID NO: 2579477 - RNA, 19 nt, Artificial Sequence
  Description of Artificial Sequence: Synthetic oligonucleotide
  Antisense strand to SEQ ID NO: 2579476
agacuuacggucaaugauu

SEQ ID NO: 2579478 - RNA, 19 nt, Artificial Sequence
  Description of Artificial Sequence: Synthetic oligonucleotide
  Sense strand starting at position 2109 of SEQ ID NO: 1889116
ugagaaauguauccaguga

SEQ ID NO: 2579479 - RNA, 19 nt, Artificial Sequence
  Description of Artificial Sequence: Synthetic oligonucleotide
  Antisense strand to SEQ ID NO: 2579478
ucacuggauacauuucuca

SEQ ID NO: 2579480 - RNA, 19 nt, Artificial Sequence
  Description of Artificial Sequence: Synthetic oligonucleotide
  Sense strand starting at position 2265 of SEQ ID NO: 1889116
acuagauuggugugaggag

SEQ ID NO: 2579481 - RNA, 19 nt, Artificial Sequence
  Description of Artificial Sequence: Synthetic oligonucleotide
  Antisense strand to SEQ ID NO: 2579480
cuccucacaccaaucuagu

SEQ ID NO: 2579482 - RNA, 19 nt, Artificial Sequence
  Description of Artificial Sequence: Synthetic oligonucleotide
  Sense strand starting at position 2281 of SEQ ID NO: 1889116
gagcacaaggccuaguaau

SEQ ID NO: 2579483 - RNA, 19 nt, Artificial Sequence
  Description of Artificial Sequence: Synthetic oligonucleotide
  Antisense strand to SEQ ID NO: 2579482
auuacuaggccuugugcuc

SEQ ID NO: 2579484 - RNA, 19 nt, Artificial Sequence
  Description of Artificial Sequence: Synthetic oligonucleotide
  Sense strand starting at position 2482 of SEQ ID NO: 1889116
guauaauagauauggaguu

SEQ ID NO: 2579485 - RNA, 19 nt, Artificial Sequence
  Description of Artificial Sequence: Synthetic oligonucleotide
  Antisense strand to SEQ ID NO: 2579484
aacuccauaucuauuauac

SEQ ID NO: 2579486 - RNA, 19 nt, Artificial Sequence
  Description of Artificial Sequence: Synthetic oligonucleotide
  Sense strand starting at position 2535 of SEQ ID NO: 1889116
gauagaugaugaucguaug

SEQ ID NO: 2579487 - RNA, 19 nt, Artificial Sequence
  Description of Artificial Sequence: Synthetic oligonucleotide
  Antisense strand to SEQ ID NO: 2579486
cauacgaucaucaucuauc

SEQ ID NO: 2579488 - RNA, 19 nt, Artificial Sequence
  Description of Artificial Sequence: Synthetic oligonucleotide
  Sense strand starting at position 2536 of SEQ ID NO: 1889116
auagaugaugaucguauga

SEQ ID NO: 2579489 - RNA, 19 nt, Artificial Sequence
  Description of Artificial Sequence: Synthetic oligonucleotide
  Antisense strand to SEQ ID NO: 2579488
ucauacgaucaucaucuau

SEQ ID NO: 2579490 - RNA, 19 nt, Artificial Sequence
  Description of Artificial Sequence: Synthetic oligonucleotide
  Sense strand starting at position 2685 of SEQ ID NO: 1889116
cguuauauuuaugcauauc

SEQ ID NO: 2579491 - RNA, 19 nt, Artificial Sequence
  Description of Artificial Sequence: Synthetic oligonucleotide
  Antisense strand to SEQ ID NO: 2579490
gauaugcauaaauauaacg

SEQ ID NO: 2579492 - RNA, 19 nt, Artificial Sequence
  Description of Artificial Sequence: Synthetic oligonucleotide
  Sense strand starting at position 2745 of SEQ ID NO: 1889116
gauuuaauuugguaugucu

SEQ ID NO: 2579493 - RNA, 19 nt, Artificial Sequence
  Description of Artificial Sequence: Synthetic oligonucleotide
  Antisense strand to SEQ ID NO: 2579492
agacauaccaaauuaaauc

SEQ ID NO: 2579494 - RNA, 19 nt, Artificial Sequence
  Description of Artificial Sequence: Synthetic oligonucleotide
  Sense strand starting at position 2753 of SEQ ID NO: 1889116
uugguaugucucuaaauau

SEQ ID NO: 2579495 - RNA, 19 nt, Artificial Sequence
  Description of Artificial Sequence: Synthetic oligonucleotide
  Antisense strand to SEQ ID NO: 2579494
auauuuagagacauaccaa

SEQ ID NO: 2579496 - RNA, 19 nt, Artificial Sequence
  Description of Artificial Sequence: Synthetic oligonucleotide
  Sense strand starting at position 2909 of SEQ ID NO: 1889116
gugucuaagcagcauauuu

SEQ ID NO: 2579497 - RNA, 19 nt, Artificial Sequence
  Description of Artificial Sequence: Synthetic oligonucleotide
  Antisense strand to SEQ ID NO: 2579496
aaauaugcugcuuagacac

SEQ ID NO: 2579498 - RNA, 19 nt, Artificial Sequence
  Description of Artificial Sequence: Synthetic oligonucleotide
  Sense strand starting at position 3146 of SEQ ID NO: 1889116
uugguaaguguugaauaug

SEQ ID NO: 2579499 - RNA, 19 nt, Artificial Sequence
  Description of Artificial Sequence: Synthetic oligonucleotide
  Antisense strand to SEQ ID NO: 2579498
cauauucaacacuuaccaa

SEQ ID NO: 2579500 - RNA, 19 nt, Artificial Sequence
  Description of Artificial Sequence: Synthetic oligonucleotide
  Sense strand starting at position 3155 of SEQ ID NO: 1889116
guugaauauguguggaaga

SEQ ID NO: 2579501 - RNA, 19 nt, Artificial Sequence
  Description of Artificial Sequence: Synthetic oligonucleotide
  Antisense strand to SEQ ID NO: 2579500
ucuuccacacauauucaac

SEQ ID NO: 2579502 - RNA, 19 nt, Artificial Sequence
  Description of Artificial Sequence: Synthetic oligonucleotide
  Sense strand starting at position 3251 of SEQ ID NO: 1889116
auugccuugguuuaauaua

SEQ ID NO: 2579503 - RNA, 19 nt, Artificial Sequence
  Description of Artificial Sequence: Synthetic oligonucleotide
  Antisense strand to SEQ ID NO: 2579502
uauauuaaaccaaggcaau

SEQ ID NO: 2579504 - RNA, 19 nt, Artificial Sequence
  Description of Artificial Sequence: Synthetic oligonucleotide
  Sense strand starting at position 3350 of SEQ ID NO: 1889116
aucaguaaacucugugaag

SEQ ID NO: 2579505 - RNA, 19 nt, Artificial Sequence
  Description of Artificial Sequence: Synthetic oligonucleotide
  Antisense strand to SEQ ID NO: 2579504
cuucacagaguuuacugau

SEQ ID NO: 2579506 - RNA, 19 nt, Artificial Sequence
  Description of Artificial Sequence: Synthetic oligonucleotide
  Sense strand starting at position 3351 of SEQ ID NO: 1889116
ucaguaaacucugugaaga

SEQ ID NO: 2579507 - RNA, 19 nt, Artificial Sequence
  Description of Artificial Sequence: Synthetic oligonucleotide
  Antisense strand to SEQ ID NO: 2579506
ucuucacagaguuuacuga

SEQ ID NO: 2579508 - RNA, 19 nt, Artificial Sequence
  Description of Artificial Sequence: Synthetic oligonucleotide
  Sense strand starting at position 3352 of SEQ ID NO: 1889116
caguaaacucugugaagau

SEQ ID NO: 2579509 - RNA, 19 nt, Artificial Sequence
  Description of Artificial Sequence: Synthetic oligonucleotide
  Antisense strand to SEQ ID NO: 2579508
aucuucacagaguuuacug

SEQ ID NO: 2579510 - RNA, 19 nt, Artificial Sequence
  Description of Artificial Sequence: Synthetic oligonucleotide
  Sense strand starting at position 3393 of SEQ ID NO: 1889116
gcaugugguuucucaauuu

SEQ ID NO: 2579511 - RNA, 19 nt, Artificial Sequence
  Description of Artificial Sequence: Synthetic oligonucleotide
  Antisense strand to SEQ ID NO: 2579510
aaauugagaaaccacaugc

SEQ ID NO: 2579512 - RNA, 19 nt, Artificial Sequence
  Description of Artificial Sequence: Synthetic oligonucleotide
  Sense strand starting at position 3718 of SEQ ID NO: 1889116
ggagauggcucagcuaaag

SEQ ID NO: 2579513 - RNA, 19 nt, Artificial Sequence
  Description of Artificial Sequence: Synthetic oligonucleotide
  Antisense strand to SEQ ID NO: 2579512
cuuuagcugagccaucucc

SEQ ID NO: 2579514 - RNA, 19 nt, Artificial Sequence
  Description of Artificial Sequence: Synthetic oligonucleotide
  Sense strand starting at position 3854 of SEQ ID NO: 1889116
gaauaagaugucugucuga

SEQ ID NO: 2579515 - RNA, 19 nt, Artificial Sequence
  Description of Artificial Sequence: Synthetic oligonucleotide
  Antisense strand to SEQ ID NO: 2579514
ucagacagacaucuuauuc

SEQ ID NO: 2579516 - RNA, 19 nt, Artificial Sequence
  Description of Artificial Sequence: Synthetic oligonucleotide
  Sense strand starting at position 1041 of SEQ ID NO: 1889117
uaagaaugugcuuauugug

SEQ ID NO: 2579517 - RNA, 19 nt, Artificial Sequence
  Description of Artificial Sequence: Synthetic oligonucleotide
  Antisense strand to SEQ ID NO: 2579516
cacaauaagcacauucuua

SEQ ID NO: 2579518 - RNA, 19 nt, Artificial Sequence
  Description of Artificial Sequence: Synthetic oligonucleotide
  Sense strand starting at position 1074 of SEQ ID NO: 1889117
uuguuaagcccucaaguga

SEQ ID NO: 2579519 - RNA, 19 nt, Artificial Sequence
  Description of Artificial Sequence: Synthetic oligonucleotide
  Antisense strand to SEQ ID NO: 2579518
ucacuugagggcuuaacaa

SEQ ID NO: 2579520 - RNA, 19 nt, Artificial Sequence
  Description of Artificial Sequence: Synthetic oligonucleotide
  Sense strand starting at position 1303 of SEQ ID NO: 1889117
uuuacugauguacaaagua

SEQ ID NO: 2579521 - RNA, 19 nt, Artificial Sequence
  Description of Artificial Sequence: Synthetic oligonucleotide
  Antisense strand to SEQ ID NO: 2579520
uacuuuguacaucaguaaa

SEQ ID NO: 2579522 - RNA, 19 nt, Artificial Sequence
  Description of Artificial Sequence: Synthetic oligonucleotide
  Sense strand starting at position 2090 of SEQ ID NO: 1889117
ugagaaauguauccaguga

SEQ ID NO: 2579523 - RNA, 19 nt, Artificial Sequence
  Description of Artificial Sequence: Synthetic oligonucleotide
  Antisense strand to SEQ ID NO: 2579522
ucacuggauacauuucuca

SEQ ID NO: 2579524 - RNA, 19 nt, Artificial Sequence
  Description of Artificial Sequence: Synthetic oligonucleotide
  Sense strand starting at position 2246 of SEQ ID NO: 1889117
acuagauuggugugaggag

SEQ ID NO: 2579525 - RNA, 19 nt, Artificial Sequence
  Description of Artificial Sequence: Synthetic oligonucleotide
  Antisense strand to SEQ ID NO: 2579524
cuccucacaccaaucuagu

SEQ ID NO: 2579526 - RNA, 19 nt, Artificial Sequence
  Description of Artificial Sequence: Synthetic oligonucleotide
  Sense strand starting at position 2262 of SEQ ID NO: 1889117
gagcacaaggccuaguaau

SEQ ID NO: 2579527 - RNA, 19 nt, Artificial Sequence
  Description of Artificial Sequence: Synthetic oligonucleotide
  Antisense strand to SEQ ID NO: 2579526
auuacuaggccuugugcuc

SEQ ID NO: 2579528 - RNA, 19 nt, Artificial Sequence
  Description of Artificial Sequence: Synthetic oligonucleotide
  Sense strand starting at position 2463 of SEQ ID NO: 1889117
guauaauagauauggaguu

SEQ ID NO: 2579529 - RNA, 19 nt, Artificial Sequence
  Description of Artificial Sequence: Synthetic oligonucleotide
  Antisense strand to SEQ ID NO: 2579528
aacuccauaucuauuauac

SEQ ID NO: 2579530 - RNA, 19 nt, Artificial Sequence
  Description of Artificial Sequence: Synthetic oligonucleotide
  Sense strand starting at position 2506 of SEQ ID NO: 1889117
aggaacuauugauagauga

SEQ ID NO: 2579531 - RNA, 19 nt, Artificial Sequence
  Description of Artificial Sequence: Synthetic oligonucleotide
  Antisense strand to SEQ ID NO: 2579530
ucaucuaucaauaguuccu

SEQ ID NO: 2579532 - RNA, 19 nt, Artificial Sequence
  Description of Artificial Sequence: Synthetic oligonucleotide
  Sense strand starting at position 2516 of SEQ ID NO: 1889117
gauagaugaugaucguaug

SEQ ID NO: 2579533 - RNA, 19 nt, Artificial Sequence
  Description of Artificial Sequence: Synthetic oligonucleotide
  Antisense strand to SEQ ID NO: 2579532
cauacgaucaucaucuauc

SEQ ID NO: 2579534 - RNA, 19 nt, Artificial Sequence
  Description of Artificial Sequence: Synthetic oligonucleotide
  Sense strand starting at position 2517 of SEQ ID NO: 1889117
auagaugaugaucguauga

SEQ ID NO: 2579535 - RNA, 19 nt, Artificial Sequence
  Description of Artificial Sequence: Synthetic oligonucleotide
  Antisense strand to SEQ ID NO: 2579534
ucauacgaucaucaucuau

SEQ ID NO: 2579536 - RNA, 19 nt, Artificial Sequence
  Description of Artificial Sequence: Synthetic oligonucleotide
  Sense strand starting at position 2666 of SEQ ID NO: 1889117
cguuauauuuaugcauauc

SEQ ID NO: 2579537 - RNA, 19 nt, Artificial Sequence
  Description of Artificial Sequence: Synthetic oligonucleotide
  Antisense strand to SEQ ID NO: 2579536
gauaugcauaaauauaacg

SEQ ID NO: 2579538 - RNA, 19 nt, Artificial Sequence
  Description of Artificial Sequence: Synthetic oligonucleotide
  Sense strand starting at position 2726 of SEQ ID NO: 1889117
gauuuaauuugguaugucu

SEQ ID NO: 2579539 - RNA, 19 nt, Artificial Sequence
  Description of Artificial Sequence: Synthetic oligonucleotide
  Antisense strand to SEQ ID NO: 2579538
agacauaccaaauuaaauc

SEQ ID NO: 2579540 - RNA, 19 nt, Artificial Sequence
  Description of Artificial Sequence: Synthetic oligonucleotide
  Sense strand starting at position 2733 of SEQ ID NO: 1889117
uuugguaugucucuaaaua

SEQ ID NO: 2579541 - RNA, 19 nt, Artificial Sequence
  Description of Artificial Sequence: Synthetic oligonucleotide
  Antisense strand to SEQ ID NO: 2579540
uauuuagagacauaccaaa

SEQ ID NO: 2579542 - RNA, 19 nt, Artificial Sequence
  Description of Artificial Sequence: Synthetic oligonucleotide
  Sense strand starting at position 2734 of SEQ ID NO: 1889117
uugguaugucucuaaauau

SEQ ID NO: 2579543 - RNA, 19 nt, Artificial Sequence
  Description of Artificial Sequence: Synthetic oligonucleotide
  Antisense strand to SEQ ID NO: 2579542
auauuuagagacauaccaa

SEQ ID NO: 2579544 - RNA, 19 nt, Artificial Sequence
  Description of Artificial Sequence: Synthetic oligonucleotide
  Sense strand starting at position 2789 of SEQ ID NO: 1889117
gggugacuuacuuguaagg

SEQ ID NO: 2579545 - RNA, 19 nt, Artificial Sequence
  Description of Artificial Sequence: Synthetic oligonucleotide
  Antisense strand to SEQ ID NO: 2579544
ccuuacaaguaagucaccc

SEQ ID NO: 2579546 - RNA, 19 nt, Artificial Sequence
  Description of Artificial Sequence: Synthetic oligonucleotide
  Sense strand starting at position 2890 of SEQ ID NO: 1889117
gugucuaagcagcauauuu

SEQ ID NO: 2579547 - RNA, 19 nt, Artificial Sequence
  Description of Artificial Sequence: Synthetic oligonucleotide
  Antisense strand to SEQ ID NO: 2579546
aaauaugcugcuuagacac

SEQ ID NO: 2579548 - RNA, 19 nt, Artificial Sequence
  Description of Artificial Sequence: Synthetic oligonucleotide
  Sense strand starting at position 2961 of SEQ ID NO: 1889117
aggaauaaucuuugugcca

SEQ ID NO: 2579549 - RNA, 19 nt, Artificial Sequence
  Description of Artificial Sequence: Synthetic oligonucleotide
  Antisense strand to SEQ ID NO: 2579548
uggcacaaagauuauuccu

SEQ ID NO: 2579550 - RNA, 19 nt, Artificial Sequence
  Description of Artificial Sequence: Synthetic oligonucleotide
  Sense strand starting at position 2962 of SEQ ID NO: 1889117
ggaauaaucuuugugccau

SEQ ID NO: 2579551 - RNA, 19 nt, Artificial Sequence
  Description of Artificial Sequence: Synthetic oligonucleotide
  Antisense strand to SEQ ID NO: 2579550
auggcacaaagauuauucc

SEQ ID NO: 2579552 - RNA, 19 nt, Artificial Sequence
  Description of Artificial Sequence: Synthetic oligonucleotide
  Sense strand starting at position 3085 of SEQ ID NO: 1889117
augguugacaguugguaua

SEQ ID NO: 2579553 - RNA, 19 nt, Artificial Sequence
  Description of Artificial Sequence: Synthetic oligonucleotide
  Antisense strand to SEQ ID NO: 2579552
uauaccaacugucaaccau

SEQ ID NO: 2579554 - RNA, 19 nt, Artificial Sequence
  Description of Artificial Sequence: Synthetic oligonucleotide
  Sense strand starting at position 3087 of SEQ ID NO: 1889117
gguugacaguugguauauu

SEQ ID NO: 2579555 - RNA, 19 nt, Artificial Sequence
  Description of Artificial Sequence: Synthetic oligonucleotide
  Antisense strand to SEQ ID NO: 2579554
aauauaccaacugucaacc

SEQ ID NO: 2579556 - RNA, 19 nt, Artificial Sequence
  Description of Artificial Sequence: Synthetic oligonucleotide
  Sense strand starting at position 3109 of SEQ ID NO: 1889117
auucgaacuccuuagcauu

SEQ ID NO: 2579557 - RNA, 19 nt, Artificial Sequence
  Description of Artificial Sequence: Synthetic oligonucleotide
  Antisense strand to SEQ ID NO: 2579556
aaugcuaaggaguucgaau

SEQ ID NO: 2579558 - RNA, 19 nt, Artificial Sequence
  Description of Artificial Sequence: Synthetic oligonucleotide
  Sense strand starting at position 3126 of SEQ ID NO: 1889117
uugguaaguguugaauaug

SEQ ID NO: 2579559 - RNA, 19 nt, Artificial Sequence
  Description of Artificial Sequence: Synthetic oligonucleotide
  Antisense strand to SEQ ID NO: 2579558
cauauucaacacuuaccaa

SEQ ID NO: 2579560 - RNA, 19 nt, Artificial Sequence
  Description of Artificial Sequence: Synthetic oligonucleotide
  Sense strand starting at position 3129 of SEQ ID NO: 1889117
guaaguguugaauaugugu

SEQ ID NO: 2579561 - RNA, 19 nt, Artificial Sequence
  Description of Artificial Sequence: Synthetic oligonucleotide
  Antisense strand to SEQ ID NO: 2579560
acacauauucaacacuuac

SEQ ID NO: 2579562 - RNA, 19 nt, Artificial Sequence
  Description of Artificial Sequence: Synthetic oligonucleotide
  Sense strand starting at position 3134 of SEQ ID NO: 1889117
uguugaauauguguggaag

SEQ ID NO: 2579563 - RNA, 19 nt, Artificial Sequence
  Description of Artificial Sequence: Synthetic oligonucleotide
  Antisense strand to SEQ ID NO: 2579562
cuuccacacauauucaaca

SEQ ID NO: 2579564 - RNA, 19 nt, Artificial Sequence
  Description of Artificial Sequence: Synthetic oligonucleotide
  Sense strand starting at position 3135 of SEQ ID NO: 1889117
guugaauauguguggaaga

SEQ ID NO: 2579565 - RNA, 19 nt, Artificial Sequence
  Description of Artificial Sequence: Synthetic oligonucleotide
  Antisense strand to SEQ ID NO: 2579564
ucuuccacacauauucaac

SEQ ID NO: 2579566 - RNA, 19 nt, Artificial Sequence
  Description of Artificial Sequence: Synthetic oligonucleotide
  Sense strand starting at position 3168 of SEQ ID NO: 1889117
ugauauuucucauacugua

SEQ ID NO: 2579567 - RNA, 19 nt, Artificial Sequence
  Description of Artificial Sequence: Synthetic oligonucleotide
  Antisense strand to SEQ ID NO: 2579566
uacaguaugagaaauauca

SEQ ID NO: 2579568 - RNA, 19 nt, Artificial Sequence
  Description of Artificial Sequence: Synthetic oligonucleotide
  Sense strand starting at position 3231 of SEQ ID NO: 1889117
auugccuugguuuaauaua

SEQ ID NO: 2579569 - RNA, 19 nt, Artificial Sequence
  Description of Artificial Sequence: Synthetic oligonucleotide
  Antisense strand to SEQ ID NO: 2579568
uauauuaaaccaaggcaau

SEQ ID NO: 2579570 - RNA, 19 nt, Artificial Sequence
  Description of Artificial Sequence: Synthetic oligonucleotide
  Sense strand starting at position 3239 of SEQ ID NO: 1889117
gguuuaauauaguuuaggu

SEQ ID NO: 2579571 - RNA, 19 nt, Artificial Sequence
  Description of Artificial Sequence: Synthetic oligonucleotide
  Antisense strand to SEQ ID NO: 2579570
accuaaacuauauuaaacc

SEQ ID NO: 2579572 - RNA, 19 nt, Artificial Sequence
  Description of Artificial Sequence: Synthetic oligonucleotide
  Sense strand starting at position 3330 of SEQ ID NO: 1889117
aucaguaaacucugugaag

SEQ ID NO: 2579573 - RNA, 19 nt, Artificial Sequence
  Description of Artificial Sequence: Synthetic oligonucleotide
  Antisense strand to SEQ ID NO: 2579572
cuucacagaguuuacugau

SEQ ID NO: 2579574 - RNA, 19 nt, Artificial Sequence
  Description of Artificial Sequence: Synthetic oligonucleotide
  Sense strand starting at position 3331 of SEQ ID NO: 1889117
ucaguaaacucugugaaga

SEQ ID NO: 2579575 - RNA, 19 nt, Artificial Sequence
  Description of Artificial Sequence: Synthetic oligonucleotide
  Antisense strand to SEQ ID NO: 2579574
ucuucacagaguuuacuga

SEQ ID NO: 2579576 - RNA, 19 nt, Artificial Sequence
  Description of Artificial Sequence: Synthetic oligonucleotide
  Sense strand starting at position 3332 of SEQ ID NO: 1889117
caguaaacucugugaagau

SEQ ID NO: 2579577 - RNA, 19 nt, Artificial Sequence
  Description of Artificial Sequence: Synthetic oligonucleotide
  Antisense strand to SEQ ID NO: 2579576
aucuucacagaguuuacug

SEQ ID NO: 2579578 - RNA, 19 nt, Artificial Sequence
  Description of Artificial Sequence: Synthetic oligonucleotide
  Sense strand starting at position 3572 of SEQ ID NO: 1889117
auaggagaaucagaagaca

SEQ ID NO: 2579579 - RNA, 19 nt, Artificial Sequence
  Description of Artificial Sequence: Synthetic oligonucleotide
  Antisense strand to SEQ ID NO: 2579578
ugucuucugauucuccuau

SEQ ID NO: 2579580 - RNA, 19 nt, Artificial Sequence
  Description of Artificial Sequence: Synthetic oligonucleotide
  Sense strand starting at position 3607 of SEQ ID NO: 1889117
aggauaaucuaagacaaau

SEQ ID NO: 2579581 - RNA, 19 nt, Artificial Sequence
  Description of Artificial Sequence: Synthetic oligonucleotide
  Antisense strand to SEQ ID NO: 2579580
auuugucuuagauuauccu

SEQ ID NO: 2579582 - RNA, 19 nt, Artificial Sequence
  Description of Artificial Sequence: Synthetic oligonucleotide
  Sense strand starting at position 3619 of SEQ ID NO: 1889117
gacaaauuguggcugagca

SEQ ID NO: 2579583 - RNA, 19 nt, Artificial Sequence
  Description of Artificial Sequence: Synthetic oligonucleotide
  Antisense strand to SEQ ID NO: 2579582
ugcucagccacaauuuguc

SEQ ID NO: 2579584 - RNA, 19 nt, Artificial Sequence
  Description of Artificial Sequence: Synthetic oligonucleotide
  Sense strand starting at position 3621 of SEQ ID NO: 1889117
caaauuguggcugagcauu

SEQ ID NO: 2579585 - RNA, 19 nt, Artificial Sequence
  Description of Artificial Sequence: Synthetic oligonucleotide
  Antisense strand to SEQ ID NO: 2579584
aaugcucagccacaauuug

SEQ ID NO: 2579586 - RNA, 19 nt, Artificial Sequence
  Description of Artificial Sequence: Synthetic oligonucleotide
  Sense strand starting at position 3646 of SEQ ID NO: 1889117
agcuaagauaggugacagu

SEQ ID NO: 2579587 - RNA, 19 nt, Artificial Sequence
  Description of Artificial Sequence: Synthetic oligonucleotide
  Antisense strand to SEQ ID NO: 2579586
acugucaccuaucuuagcu

SEQ ID NO: 2579588 - RNA, 19 nt, Artificial Sequence
  Description of Artificial Sequence: Synthetic oligonucleotide
  Sense strand starting at position 3672 of SEQ ID NO: 1889117
ggaagaaugccuuggugug

SEQ ID NO: 2579589 - RNA, 19 nt, Artificial Sequence
  Description of Artificial Sequence: Synthetic oligonucleotide
  Antisense strand to SEQ ID NO: 2579588
cacaccaaggcauucuucc

SEQ ID NO: 2579590 - RNA, 19 nt, Artificial Sequence
  Description of Artificial Sequence: Synthetic oligonucleotide
  Sense strand starting at position 3698 of SEQ ID NO: 1889117
ggagauggcucagcuaaag

SEQ ID NO: 2579591 - RNA, 19 nt, Artificial Sequence
  Description of Artificial Sequence: Synthetic oligonucleotide
  Antisense strand to SEQ ID NO: 2579590
cuuuagcugagccaucucc

SEQ ID NO: 2579592 - RNA, 19 nt, Artificial Sequence
  Description of Artificial Sequence: Synthetic oligonucleotide
  Sense strand starting at position 3834 of SEQ ID NO: 1889117
gaauaagaugucugucuga

SEQ ID NO: 2579593 - RNA, 19 nt, Artificial Sequence
  Description of Artificial Sequence: Synthetic oligonucleotide
  Antisense strand to SEQ ID NO: 2579592
ucagacagacaucuuauuc

SEQ ID NO: 2579594 - RNA, 19 nt, Artificial Sequence
  Description of Artificial Sequence: Synthetic oligonucleotide
  Sense strand starting at position 3837 of SEQ ID NO: 1889117
uaagaugucugucugaucu

SEQ ID NO: 2579595 - RNA, 19 nt, Artificial Sequence
  Description of Artificial Sequence: Synthetic oligonucleotide
  Antisense strand to SEQ ID NO: 2579594
agaucagacagacaucuua

SEQ ID NO: 2579596 - RNA, 19 nt, Artificial Sequence
  Description of Artificial Sequence: Synthetic oligonucleotide
  Sense strand starting at position 218 of SEQ ID NO: 1889118
auauuuguccaguggugau

SEQ ID NO: 2579597 - RNA, 19 nt, Artificial Sequence
  Description of Artificial Sequence: Synthetic oligonucleotide
  Antisense strand to SEQ ID NO: 2579596
aucaccacuggacaaauau

SEQ ID NO: 2579598 - RNA, 19 nt, Artificial Sequence
  Description of Artificial Sequence: Synthetic oligonucleotide
  Sense strand starting at position 242 of SEQ ID NO: 1889118
aagagcuagccuggaauga

SEQ ID NO: 2579599 - RNA, 19 nt, Artificial Sequence
  Description of Artificial Sequence: Synthetic oligonucleotide
  Antisense strand to SEQ ID NO: 2579598
ucauuccaggcuagcucuu

SEQ ID NO: 2579600 - RNA, 19 nt, Artificial Sequence
  Description of Artificial Sequence: Synthetic oligonucleotide
  Sense strand starting at position 417 of SEQ ID NO: 1889118
ggagauaugaugugguauu

SEQ ID NO: 2579601 - RNA, 19 nt, Artificial Sequence
  Description of Artificial Sequence: Synthetic oligonucleotide
  Antisense strand to SEQ ID NO: 2579600
aauaccacaucauaucucc

SEQ ID NO: 2579602 - RNA, 19 nt, Artificial Sequence
  Description of Artificial Sequence: Synthetic oligonucleotide
  Sense strand starting at position 505 of SEQ ID NO: 1889118
uaugaauaguggucaacug

SEQ ID NO: 2579603 - RNA, 19 nt, Artificial Sequence
  Description of Artificial Sequence: Synthetic oligonucleotide
  Antisense strand to SEQ ID NO: 2579602
caguugaccacuauucaua

SEQ ID NO: 2579604 - RNA, 19 nt, Artificial Sequence
  Description of Artificial Sequence: Synthetic oligonucleotide
  Sense strand starting at position 545 of SEQ ID NO: 1889118
uguugcaauuuguucugau

SEQ ID NO: 2579605 - RNA, 19 nt, Artificial Sequence
  Description of Artificial Sequence: Synthetic oligonucleotide
  Antisense strand to SEQ ID NO: 2579604
aucagaacaaauugcaaca

SEQ ID NO: 2579606 - RNA, 19 nt, Artificial Sequence
  Description of Artificial Sequence: Synthetic oligonucleotide
  Sense strand starting at position 546 of SEQ ID NO: 1889118
guugcaauuuguucugaug

SEQ ID NO: 2579607 - RNA, 19 nt, Artificial Sequence
  Description of Artificial Sequence: Synthetic oligonucleotide
  Antisense strand to SEQ ID NO: 2579606
caucagaacaaauugcaac

SEQ ID NO: 2579608 - RNA, 19 nt, Artificial Sequence
  Description of Artificial Sequence: Synthetic oligonucleotide
  Sense strand starting at position 641 of SEQ ID NO: 1889118
gacagaagauucccuuguu

SEQ ID NO: 2579609 - RNA, 19 nt, Artificial Sequence
  Description of Artificial Sequence: Synthetic oligonucleotide
  Antisense strand to SEQ ID NO: 2579608
aacaagggaaucuucuguc

SEQ ID NO: 2579610 - RNA, 19 nt, Artificial Sequence
  Description of Artificial Sequence: Synthetic oligonucleotide
  Sense strand starting at position 642 of SEQ ID NO: 1889118
acagaagauucccuuguua

SEQ ID NO: 2579611 - RNA, 19 nt, Artificial Sequence
  Description of Artificial Sequence: Synthetic oligonucleotide
  Antisense strand to SEQ ID NO: 2579610
uaacaagggaaucuucugu

SEQ ID NO: 2579612 - RNA, 19 nt, Artificial Sequence
  Description of Artificial Sequence: Synthetic oligonucleotide
  Sense strand starting at position 644 of SEQ ID NO: 1889118
agaagauucccuuguuaga

SEQ ID NO: 2579613 - RNA, 19 nt, Artificial Sequence
  Description of Artificial Sequence: Synthetic oligonucleotide
  Antisense strand to SEQ ID NO: 2579612
ucuaacaagggaaucuucu

SEQ ID NO: 2579614 - RNA, 19 nt, Artificial Sequence
  Description of Artificial Sequence: Synthetic oligonucleotide
  Sense strand starting at position 723 of SEQ ID NO: 1889118
gcagaauuaugauucucca

SEQ ID NO: 2579615 - RNA, 19 nt, Artificial Sequence
  Description of Artificial Sequence: Synthetic oligonucleotide
  Antisense strand to SEQ ID NO: 2579614
uggagaaucauaauucugc

SEQ ID NO: 2579616 - RNA, 19 nt, Artificial Sequence
  Description of Artificial Sequence: Synthetic oligonucleotide
  Sense strand starting at position 772 of SEQ ID NO: 1889118
ugaaaucuucguugaauaa

SEQ ID NO: 2579617 - RNA, 19 nt, Artificial Sequence
  Description of Artificial Sequence: Synthetic oligonucleotide
  Antisense strand to SEQ ID NO: 2579616
uuauucaacgaagauuuca

SEQ ID NO: 2579618 - RNA, 19 nt, Artificial Sequence
  Description of Artificial Sequence: Synthetic oligonucleotide
  Sense strand starting at position 776 of SEQ ID NO: 1889118
aucuucguugaauaaagua

SEQ ID NO: 2579619 - RNA, 19 nt, Artificial Sequence
  Description of Artificial Sequence: Synthetic oligonucleotide
  Antisense strand to SEQ ID NO: 2579618
uacuuuauucaacgaagau

SEQ ID NO: 2579620 - RNA, 19 nt, Artificial Sequence
  Description of Artificial Sequence: Synthetic oligonucleotide
  Sense strand starting at position 781 of SEQ ID NO: 1889118
cguugaauaaaguagauau

SEQ ID NO: 2579621 - RNA, 19 nt, Artificial Sequence
  Description of Artificial Sequence: Synthetic oligonucleotide
  Antisense strand to SEQ ID NO: 2579620
auaucuacuuuauucaacg

SEQ ID NO: 2579622 - RNA, 19 nt, Artificial Sequence
  Description of Artificial Sequence: Synthetic oligonucleotide
  Sense strand starting at position 791 of SEQ ID NO: 1889118
aguagauauaggugaagca

SEQ ID NO: 2579623 - RNA, 19 nt, Artificial Sequence
  Description of Artificial Sequence: Synthetic oligonucleotide
  Antisense strand to SEQ ID NO: 2579622
ugcuucaccuauaucuacu

SEQ ID NO: 2579624 - RNA, 19 nt, Artificial Sequence
  Description of Artificial Sequence: Synthetic oligonucleotide
  Sense strand starting at position 792 of SEQ ID NO: 1889118
guagauauaggugaagcau

SEQ ID NO: 2579625 - RNA, 19 nt, Artificial Sequence
  Description of Artificial Sequence: Synthetic oligonucleotide
  Antisense strand to SEQ ID NO: 2579624
augcuucaccuauaucuac

SEQ ID NO: 2579626 - RNA, 19 nt, Artificial Sequence
  Description of Artificial Sequence: Synthetic oligonucleotide
  Sense strand starting at position 1136 of SEQ ID NO: 1889118
guacauuuauuuggaauuc

SEQ ID NO: 2579627 - RNA, 19 nt, Artificial Sequence
  Description of Artificial Sequence: Synthetic oligonucleotide
  Antisense strand to SEQ ID NO: 2579626
gaauuccaaauaaauguac

SEQ ID NO: 2579628 - RNA, 19 nt, Artificial Sequence
  Description of Artificial Sequence: Synthetic oligonucleotide
  Sense strand starting at position 1302 of SEQ ID NO: 1889118
uuuacugauguacaaagua

SEQ ID NO: 2579629 - RNA, 19 nt, Artificial Sequence
  Description of Artificial Sequence: Synthetic oligonucleotide
  Antisense strand to SEQ ID NO: 2579628
uacuuuguacaucaguaaa

SEQ ID NO: 2579630 - RNA, 19 nt, Artificial Sequence
  Description of Artificial Sequence: Synthetic oligonucleotide
  Sense strand starting at position 1372 of SEQ ID NO: 1889118
uugcuuaagacagacgauu

SEQ ID NO: 2579631 - RNA, 19 nt, Artificial Sequence
  Description of Artificial Sequence: Synthetic oligonucleotide
  Antisense strand to SEQ ID NO: 2579630
aaucgucugucuuaagcaa

SEQ ID NO: 2579632 - RNA, 19 nt, Artificial Sequence
  Description of Artificial Sequence: Synthetic oligonucleotide
  Sense strand starting at position 1492 of SEQ ID NO: 1889118
auagcaucaguuugaaaua

SEQ ID NO: 2579633 - RNA, 19 nt, Artificial Sequence
  Description of Artificial Sequence: Synthetic oligonucleotide
  Antisense strand to SEQ ID NO: 2579632
uauuucaaacugaugcuau

SEQ ID NO: 2579634 - RNA, 19 nt, Artificial Sequence
  Description of Artificial Sequence: Synthetic oligonucleotide
  Sense strand starting at position 1630 of SEQ ID NO: 1889118
caaaguuuccugggaaagu

SEQ ID NO: 2579635 - RNA, 19 nt, Artificial Sequence
  Description of Artificial Sequence: Synthetic oligonucleotide
  Antisense strand to SEQ ID NO: 2579634
acuuucccaggaaacuuug

SEQ ID NO: 2579636 - RNA, 19 nt, Artificial Sequence
  Description of Artificial Sequence: Synthetic oligonucleotide
  Sense strand starting at position 1755 of SEQ ID NO: 1889118
aaucauugaccguaagucu

SEQ ID NO: 2579637 - RNA, 19 nt, Artificial Sequence
  Description of Artificial Sequence: Synthetic oligonucleotide
  Antisense strand to SEQ ID NO: 2579636
agacuuacggucaaugauu

SEQ ID NO: 2579638 - RNA, 19 nt, Artificial Sequence
  Description of Artificial Sequence: Synthetic oligonucleotide
  Sense strand starting at position 2089 of SEQ ID NO: 1889118
ugagaaauguauccaguga

SEQ ID NO: 2579639 - RNA, 19 nt, Artificial Sequence
  Description of Artificial Sequence: Synthetic oligonucleotide
  Antisense strand to SEQ ID NO: 2579638
ucacuggauacauuucuca

SEQ ID NO: 2579640 - RNA, 19 nt, Artificial Sequence
  Description of Artificial Sequence: Synthetic oligonucleotide
  Sense strand starting at position 2245 of SEQ ID NO: 1889118
acuagauuggugugaggag

SEQ ID NO: 2579641 - RNA, 19 nt, Artificial Sequence
  Description of Artificial Sequence: Synthetic oligonucleotide
  Antisense strand to SEQ ID NO: 2579640
cuccucacaccaaucuagu

SEQ ID NO: 2579642 - RNA, 19 nt, Artificial Sequence
  Description of Artificial Sequence: Synthetic oligonucleotide
  Sense strand starting at position 2261 of SEQ ID NO: 1889118
gagcacaaggccuaguaau

SEQ ID NO: 2579643 - RNA, 19 nt, Artificial Sequence
  Description of Artificial Sequence: Synthetic oligonucleotide
  Antisense strand to SEQ ID NO: 2579642
auuacuaggccuugugcuc

SEQ ID NO: 2579644 - RNA, 19 nt, Artificial Sequence
  Description of Artificial Sequence: Synthetic oligonucleotide
  Sense strand starting at position 2462 of SEQ ID NO: 1889118
guauaauagauauggaguu

SEQ ID NO: 2579645 - RNA, 19 nt, Artificial Sequence
  Description of Artificial Sequence: Synthetic oligonucleotide
  Antisense strand to SEQ ID NO: 2579644
aacuccauaucuauuauac

SEQ ID NO: 2579646 - RNA, 19 nt, Artificial Sequence
  Description of Artificial Sequence: Synthetic oligonucleotide
  Sense strand starting at position 2515 of SEQ ID NO: 1889118
gauagaugaugaucguaug

SEQ ID NO: 2579647 - RNA, 19 nt, Artificial Sequence
  Description of Artificial Sequence: Synthetic oligonucleotide
  Antisense strand to SEQ ID NO: 2579646
cauacgaucaucaucuauc

SEQ ID NO: 2579648 - RNA, 19 nt, Artificial Sequence
  Description of Artificial Sequence: Synthetic oligonucleotide
  Sense strand starting at position 2516 of SEQ ID NO: 1889118
auagaugaugaucguauga

SEQ ID NO: 2579649 - RNA, 19 nt, Artificial Sequence
  Description of Artificial Sequence: Synthetic oligonucleotide
  Antisense strand to SEQ ID NO: 2579648
ucauacgaucaucaucuau

SEQ ID NO: 2579650 - RNA, 19 nt, Artificial Sequence
  Description of Artificial Sequence: Synthetic oligonucleotide
  Sense strand starting at position 2665 of SEQ ID NO: 1889118
cguuauauuuaugcauauc

SEQ ID NO: 2579651 - RNA, 19 nt, Artificial Sequence
  Description of Artificial Sequence: Synthetic oligonucleotide
  Antisense strand to SEQ ID NO: 2579650
gauaugcauaaauauaacg

SEQ ID NO: 2579652 - RNA, 19 nt, Artificial Sequence
  Description of Artificial Sequence: Synthetic oligonucleotide
  Sense strand starting at position 2725 of SEQ ID NO: 1889118
gauuuaauuugguaugucu

SEQ ID NO: 2579653 - RNA, 19 nt, Artificial Sequence
  Description of Artificial Sequence: Synthetic oligonucleotide
  Antisense strand to SEQ ID NO: 2579652
agacauaccaaauuaaauc

SEQ ID NO: 2579654 - RNA, 19 nt, Artificial Sequence
  Description of Artificial Sequence: Synthetic oligonucleotide
  Sense strand starting at position 2733 of SEQ ID NO: 1889118
uugguaugucucuaaauau

SEQ ID NO: 2579655 - RNA, 19 nt, Artificial Sequence
  Description of Artificial Sequence: Synthetic oligonucleotide
  Antisense strand to SEQ ID NO: 2579654
auauuuagagacauaccaa

SEQ ID NO: 2579656 - RNA, 19 nt, Artificial Sequence
  Description of Artificial Sequence: Synthetic oligonucleotide
  Sense strand starting at position 2889 of SEQ ID NO: 1889118
gugucuaagcagcauauuu

SEQ ID NO: 2579657 - RNA, 19 nt, Artificial Sequence
  Description of Artificial Sequence: Synthetic oligonucleotide
  Antisense strand to SEQ ID NO: 2579656
aaauaugcugcuuagacac

SEQ ID NO: 2579658 - RNA, 19 nt, Artificial Sequence
  Description of Artificial Sequence: Synthetic oligonucleotide
  Sense strand starting at position 3126 of SEQ ID NO: 1889118
uugguaaguguugaauaug

SEQ ID NO: 2579659 - RNA, 19 nt, Artificial Sequence
  Description of Artificial Sequence: Synthetic oligonucleotide
  Antisense strand to SEQ ID NO: 2579658
cauauucaacacuuaccaa

SEQ ID NO: 2579660 - RNA, 19 nt, Artificial Sequence
  Description of Artificial Sequence: Synthetic oligonucleotide
  Sense strand starting at position 3135 of SEQ ID NO: 1889118
guugaauauguguggaaga

SEQ ID NO: 2579661 - RNA, 19 nt, Artificial Sequence
  Description of Artificial Sequence: Synthetic oligonucleotide
  Antisense strand to SEQ ID NO: 2579660
ucuuccacacauauucaac

SEQ ID NO: 2579662 - RNA, 19 nt, Artificial Sequence
  Description of Artificial Sequence: Synthetic oligonucleotide
  Sense strand starting at position 3231 of SEQ ID NO: 1889118
auugccuugguuuaauaua

SEQ ID NO: 2579663 - RNA, 19 nt, Artificial Sequence
  Description of Artificial Sequence: Synthetic oligonucleotide
  Antisense strand to SEQ ID NO: 2579662
uauauuaaaccaaggcaau

SEQ ID NO: 2579664 - RNA, 19 nt, Artificial Sequence
  Description of Artificial Sequence: Synthetic oligonucleotide
  Sense strand starting at position 3330 of SEQ ID NO: 1889118
aucaguaaacucugugaag

SEQ ID NO: 2579665 - RNA, 19 nt, Artificial Sequence
  Description of Artificial Sequence: Synthetic oligonucleotide
  Antisense strand to SEQ ID NO: 2579664
cuucacagaguuuacugau

SEQ ID NO: 2579666 - RNA, 19 nt, Artificial Sequence
  Description of Artificial Sequence: Synthetic oligonucleotide
  Sense strand starting at position 3331 of SEQ ID NO: 1889118
ucaguaaacucugugaaga

SEQ ID NO: 2579667 - RNA, 19 nt, Artificial Sequence
  Description of Artificial Sequence: Synthetic oligonucleotide
  Antisense strand to SEQ ID NO: 2579666
ucuucacagaguuuacuga

SEQ ID NO: 2579668 - RNA, 19 nt, Artificial Sequence
  Description of Artificial Sequence: Synthetic oligonucleotide
  Sense strand starting at position 3332 of SEQ ID NO: 1889118
caguaaacucugugaagau

SEQ ID NO: 2579669 - RNA, 19 nt, Artificial Sequence
  Description of Artificial Sequence: Synthetic oligonucleotide
  Antisense strand to SEQ ID NO: 2579668
aucuucacagaguuuacug

SEQ ID NO: 2579670 - RNA, 19 nt, Artificial Sequence
  Description of Artificial Sequence: Synthetic oligonucleotide
  Sense strand starting at position 3373 of SEQ ID NO: 1889118
gcaugugguuucucaauuu

SEQ ID NO: 2579671 - RNA, 19 nt, Artificial Sequence
  Description of Artificial Sequence: Synthetic oligonucleotide
  Antisense strand to SEQ ID NO: 2579670
aaauugagaaaccacaugc

SEQ ID NO: 2579672 - RNA, 19 nt, Artificial Sequence
  Description of Artificial Sequence: Synthetic oligonucleotide
  Sense strand starting at position 3698 of SEQ ID NO: 1889118
ggagauggcucagcuaaag

SEQ ID NO: 2579673 - RNA, 19 nt, Artificial Sequence
  Description of Artificial Sequence: Synthetic oligonucleotide
  Antisense strand to SEQ ID NO: 2579672
cuuuagcugagccaucucc

SEQ ID NO: 2579674 - RNA, 19 nt, Artificial Sequence
  Description of Artificial Sequence: Synthetic oligonucleotide
  Sense strand starting at position 3834 of SEQ ID NO: 1889118
gaauaagaugucugucuga

SEQ ID NO: 2579675 - RNA, 19 nt, Artificial Sequence
  Description of Artificial Sequence: Synthetic oligonucleotide
  Antisense strand to SEQ ID NO: 2579674
ucagacagacaucuuauuc

SEQ ID NO: 2579676 - RNA, 19 nt, Artificial Sequence
  Description of Artificial Sequence: Synthetic oligonucleotide
  Sense strand starting at position 47 of SEQ ID NO: 1889120
agugaaacacucuagcuuu

SEQ ID NO: 2579677 - RNA, 19 nt, Artificial Sequence
  Description of Artificial Sequence: Synthetic oligonucleotide
  Antisense strand to SEQ ID NO: 2579676
aaagcuagaguguuucacu

SEQ ID NO: 2579678 - RNA, 19 nt, Artificial Sequence
  Description of Artificial Sequence: Synthetic oligonucleotide
  Sense strand starting at position 89 of SEQ ID NO: 1889120
cuggguuugcccuacaaac

SEQ ID NO: 2579679 - RNA, 19 nt, Artificial Sequence
  Description of Artificial Sequence: Synthetic oligonucleotide
  Antisense strand to SEQ ID NO: 2579678
guuuguagggcaaacccag

SEQ ID NO: 2579680 - RNA, 19 nt, Artificial Sequence
  Description of Artificial Sequence: Synthetic oligonucleotide
  Sense strand starting at position 371 of SEQ ID NO: 1889120
ugcauaugccaggacauua

SEQ ID NO: 2579681 - RNA, 19 nt, Artificial Sequence
  Description of Artificial Sequence: Synthetic oligonucleotide
  Antisense strand to SEQ ID NO: 2579680
uaauguccuggcauaugca

SEQ ID NO: 2579682 - RNA, 19 nt, Artificial Sequence
  Description of Artificial Sequence: Synthetic oligonucleotide
  Sense strand starting at position 579 of SEQ ID NO: 1889120
guguuuccaguuuaggaga

SEQ ID NO: 2579683 - RNA, 19 nt, Artificial Sequence
  Description of Artificial Sequence: Synthetic oligonucleotide
  Antisense strand to SEQ ID NO: 2579682
ucuccuaaacuggaaacac

SEQ ID NO: 2579684 - RNA, 19 nt, Artificial Sequence
  Description of Artificial Sequence: Synthetic oligonucleotide
  Sense strand starting at position 809 of SEQ ID NO: 1889120
gguguaucaucaucugagu

SEQ ID NO: 2579685 - RNA, 19 nt, Artificial Sequence
  Description of Artificial Sequence: Synthetic oligonucleotide
  Antisense strand to SEQ ID NO: 2579684
acucagaugaugauacacc

SEQ ID NO: 2579686 - RNA, 19 nt, Artificial Sequence
  Description of Artificial Sequence: Synthetic oligonucleotide
  Sense strand starting at position 848 of SEQ ID NO: 1889120
cuugguaaagguggauaga

SEQ ID NO: 2579687 - RNA, 19 nt, Artificial Sequence
  Description of Artificial Sequence: Synthetic oligonucleotide
  Antisense strand to SEQ ID NO: 2579686
ucuauccaccuuuaccaag

SEQ ID NO: 2579688 - RNA, 19 nt, Artificial Sequence
  Description of Artificial Sequence: Synthetic oligonucleotide
  Sense strand starting at position 857 of SEQ ID NO: 1889120
gguggauagauuggugcau

SEQ ID NO: 2579689 - RNA, 19 nt, Artificial Sequence
  Description of Artificial Sequence: Synthetic oligonucleotide
  Antisense strand to SEQ ID NO: 2579688
augcaccaaucuauccacc

SEQ ID NO: 2579690 - RNA, 19 nt, Artificial Sequence
  Description of Artificial Sequence: Synthetic oligonucleotide
  Sense strand starting at position 858 of SEQ ID NO: 1889120
guggauagauuggugcaua

SEQ ID NO: 2579691 - RNA, 19 nt, Artificial Sequence
  Description of Artificial Sequence: Synthetic oligonucleotide
  Antisense strand to SEQ ID NO: 2579690
uaugcaccaaucuauccac

SEQ ID NO: 2579692 - RNA, 19 nt, Artificial Sequence
  Description of Artificial Sequence: Synthetic oligonucleotide
  Sense strand starting at position 956 of SEQ ID NO: 1889120
gacaguaaagcugaauucu

SEQ ID NO: 2579693 - RNA, 19 nt, Artificial Sequence
  Description of Artificial Sequence: Synthetic oligonucleotide
  Antisense strand to SEQ ID NO: 2579692
agaauucagcuuuacuguc

SEQ ID NO: 2579694 - RNA, 19 nt, Artificial Sequence
  Description of Artificial Sequence: Synthetic oligonucleotide
  Sense strand starting at position 1001 of SEQ ID NO: 1889120
accaguguucugcaauaag

SEQ ID NO: 2579695 - RNA, 19 nt, Artificial Sequence
  Description of Artificial Sequence: Synthetic oligonucleotide
  Antisense strand to SEQ ID NO: 2579694
cuuauugcagaacacuggu

SEQ ID NO: 2579696 - RNA, 19 nt, Artificial Sequence
  Description of Artificial Sequence: Synthetic oligonucleotide
  Sense strand starting at position 1043 of SEQ ID NO: 1889120
acaggucgaguuugaauua

SEQ ID NO: 2579697 - RNA, 19 nt, Artificial Sequence
  Description of Artificial Sequence: Synthetic oligonucleotide
  Antisense strand to SEQ ID NO: 2579696
uaauucaaacucgaccugu

SEQ ID NO: 2579698 - RNA, 19 nt, Artificial Sequence
  Description of Artificial Sequence: Synthetic oligonucleotide
  Sense strand starting at position 1065 of SEQ ID NO: 1889120
ucagccgugagucaauaua

SEQ ID NO: 2579699 - RNA, 19 nt, Artificial Sequence
  Description of Artificial Sequence: Synthetic oligonucleotide
  Antisense strand to SEQ ID NO: 2579698
uauauugacucacggcuga

SEQ ID NO: 2579700 - RNA, 19 nt, Artificial Sequence
  Description of Artificial Sequence: Synthetic oligonucleotide
  Sense strand starting at position 1084 of SEQ ID NO: 1889120
aggaaauuggccuggaagu

SEQ ID NO: 2579701 - RNA, 19 nt, Artificial Sequence
  Description of Artificial Sequence: Synthetic oligonucleotide
  Antisense strand to SEQ ID NO: 2579700
acuuccaggccaauuuccu

SEQ ID NO: 2579702 - RNA, 19 nt, Artificial Sequence
  Description of Artificial Sequence: Synthetic oligonucleotide
  Sense strand starting at position 1085 of SEQ ID NO: 1889120
ggaaauuggccuggaaguc

SEQ ID NO: 2579703 - RNA, 19 nt, Artificial Sequence
  Description of Artificial Sequence: Synthetic oligonucleotide
  Antisense strand to SEQ ID NO: 2579702
gacuuccaggccaauuucc

SEQ ID NO: 2579704 - RNA, 19 nt, Artificial Sequence
  Description of Artificial Sequence: Synthetic oligonucleotide
  Sense strand starting at position 1235 of SEQ ID NO: 1889120
gggucaacuugaucccaua

SEQ ID NO: 2579705 - RNA, 19 nt, Artificial Sequence
  Description of Artificial Sequence: Synthetic oligonucleotide
  Antisense strand to SEQ ID NO: 2579704
uaugggaucaaguugaccc

SEQ ID NO: 2579706 - RNA, 19 nt, Artificial Sequence
  Description of Artificial Sequence: Synthetic oligonucleotide
  Sense strand starting at position 1272 of SEQ ID NO: 1889120
cuuaaaguuguuuaacaug

SEQ ID NO: 2579707 - RNA, 19 nt, Artificial Sequence
  Description of Artificial Sequence: Synthetic oligonucleotide
  Antisense strand to SEQ ID NO: 2579706
cauguuaaacaacuuuaag

SEQ ID NO: 2579708 - RNA, 19 nt, Artificial Sequence
  Description of Artificial Sequence: Synthetic oligonucleotide
  Sense strand starting at position 1416 of SEQ ID NO: 1889120
acugcuaagcuuuaaagga

SEQ ID NO: 2579709 - RNA, 19 nt, Artificial Sequence
  Description of Artificial Sequence: Synthetic oligonucleotide
  Antisense strand to SEQ ID NO: 2579708
uccuuuaaagcuuagcagu

SEQ ID NO: 2579710 - RNA, 19 nt, Artificial Sequence
  Description of Artificial Sequence: Synthetic oligonucleotide
  Sense strand starting at position 1424 of SEQ ID NO: 1889120
gcuuuaaaggaggguuuga

SEQ ID NO: 2579711 - RNA, 19 nt, Artificial Sequence
  Description of Artificial Sequence: Synthetic oligonucleotide
  Antisense strand to SEQ ID NO: 2579710
ucaaacccuccuuuaaagc

SEQ ID NO: 2579712 - RNA, 19 nt, Artificial Sequence
  Description of Artificial Sequence: Synthetic oligonucleotide
  Sense strand starting at position 1596 of SEQ ID NO: 1889120
cccgguuucguuucuuaac

SEQ ID NO: 2579713 - RNA, 19 nt, Artificial Sequence
  Description of Artificial Sequence: Synthetic oligonucleotide
  Antisense strand to SEQ ID NO: 2579712
guuaagaaacgaaaccggg

SEQ ID NO: 2579714 - RNA, 19 nt, Artificial Sequence
  Description of Artificial Sequence: Synthetic oligonucleotide
  Sense strand starting at position 1653 of SEQ ID NO: 1889120
gguguagguuucuuccaaa

SEQ ID NO: 2579715 - RNA, 19 nt, Artificial Sequence
  Description of Artificial Sequence: Synthetic oligonucleotide
  Antisense strand to SEQ ID NO: 2579714
uuuggaagaaaccuacacc

SEQ ID NO: 2579716 - RNA, 19 nt, Artificial Sequence
  Description of Artificial Sequence: Synthetic oligonucleotide
  Sense strand starting at position 1687 of SEQ ID NO: 1889120
ugcauccugggucauauua

SEQ ID NO: 2579717 - RNA, 19 nt, Artificial Sequence
  Description of Artificial Sequence: Synthetic oligonucleotide
  Antisense strand to SEQ ID NO: 2579716
uaauaugacccaggaugca

SEQ ID NO: 2579718 - RNA, 19 nt, Artificial Sequence
  Description of Artificial Sequence: Synthetic oligonucleotide
  Sense strand starting at position 1694 of SEQ ID NO: 1889120
ugggucauauuacuaggua

SEQ ID NO: 2579719 - RNA, 19 nt, Artificial Sequence
  Description of Artificial Sequence: Synthetic oligonucleotide
  Antisense strand to SEQ ID NO: 2579718
uaccuaguaauaugaccca

SEQ ID NO: 2579720 - RNA, 19 nt, Artificial Sequence
  Description of Artificial Sequence: Synthetic oligonucleotide
  Sense strand starting at position 1697 of SEQ ID NO: 1889120
gucauauuacuagguauac

SEQ ID NO: 2579721 - RNA, 19 nt, Artificial Sequence
  Description of Artificial Sequence: Synthetic oligonucleotide
  Antisense strand to SEQ ID NO: 2579720
guauaccuaguaauaugac

SEQ ID NO: 2579722 - RNA, 19 nt, Artificial Sequence
  Description of Artificial Sequence: Synthetic oligonucleotide
  Sense strand starting at position 2228 of SEQ ID NO: 1889120
ggucuuguaacucaggcau

SEQ ID NO: 2579723 - RNA, 19 nt, Artificial Sequence
  Description of Artificial Sequence: Synthetic oligonucleotide
  Antisense strand to SEQ ID NO: 2579722
augccugaguuacaagacc

SEQ ID NO: 2579724 - RNA, 19 nt, Artificial Sequence
  Description of Artificial Sequence: Synthetic oligonucleotide
  Sense strand starting at position 2258 of SEQ ID NO: 1889120
uuugccauccugcacagau

SEQ ID NO: 2579725 - RNA, 19 nt, Artificial Sequence
  Description of Artificial Sequence: Synthetic oligonucleotide
  Antisense strand to SEQ ID NO: 2579724
aucugugcaggauggcaaa

SEQ ID NO: 2579726 - RNA, 19 nt, Artificial Sequence
  Description of Artificial Sequence: Synthetic oligonucleotide
  Sense strand starting at position 2353 of SEQ ID NO: 1889120
gaaugauggcauggguaga

SEQ ID NO: 2579727 - RNA, 19 nt, Artificial Sequence
  Description of Artificial Sequence: Synthetic oligonucleotide
  Antisense strand to SEQ ID NO: 2579726
ucuacccaugccaucauuc

SEQ ID NO: 2579728 - RNA, 19 nt, Artificial Sequence
  Description of Artificial Sequence: Synthetic oligonucleotide
  Sense strand starting at position 2380 of SEQ ID NO: 1889120
ggaagacacugauaagaac

SEQ ID NO: 2579729 - RNA, 19 nt, Artificial Sequence
  Description of Artificial Sequence: Synthetic oligonucleotide
  Antisense strand to SEQ ID NO: 2579728
guucuuaucagugucuucc

SEQ ID NO: 2579730 - RNA, 19 nt, Artificial Sequence
  Description of Artificial Sequence: Synthetic oligonucleotide
  Sense strand starting at position 2687 of SEQ ID NO: 1889120
gagugucuagcugauacca

SEQ ID NO: 2579731 - RNA, 19 nt, Artificial Sequence
  Description of Artificial Sequence: Synthetic oligonucleotide
  Antisense strand to SEQ ID NO: 2579730
ugguaucagcuagacacuc

SEQ ID NO: 2579732 - RNA, 19 nt, Artificial Sequence
  Description of Artificial Sequence: Synthetic oligonucleotide
  Sense strand starting at position 2830 of SEQ ID NO: 1889120
auuccauugccugguauuu

SEQ ID NO: 2579733 - RNA, 19 nt, Artificial Sequence
  Description of Artificial Sequence: Synthetic oligonucleotide
  Antisense strand to SEQ ID NO: 2579732
aaauaccaggcaauggaau

SEQ ID NO: 2579734 - RNA, 19 nt, Artificial Sequence
  Description of Artificial Sequence: Synthetic oligonucleotide
  Sense strand starting at position 2986 of SEQ ID NO: 1889120
gauguaaccuguuucuaga

SEQ ID NO: 2579735 - RNA, 19 nt, Artificial Sequence
  Description of Artificial Sequence: Synthetic oligonucleotide
  Antisense strand to SEQ ID NO: 2579734
ucuagaaacagguuacauc

SEQ ID NO: 2579736 - RNA, 19 nt, Artificial Sequence
  Description of Artificial Sequence: Synthetic oligonucleotide
  Sense strand starting at position 3111 of SEQ ID NO: 1889120
uugacuauuccagggacuu

SEQ ID NO: 2579737 - RNA, 19 nt, Artificial Sequence
  Description of Artificial Sequence: Synthetic oligonucleotide
  Antisense strand to SEQ ID NO: 2579736
aagucccuggaauagucaa

SEQ ID NO: 2579738 - RNA, 19 nt, Artificial Sequence
  Description of Artificial Sequence: Synthetic oligonucleotide
  Sense strand starting at position 3112 of SEQ ID NO: 1889120
ugacuauuccagggacuuc

SEQ ID NO: 2579739 - RNA, 19 nt, Artificial Sequence
  Description of Artificial Sequence: Synthetic oligonucleotide
  Antisense strand to SEQ ID NO: 2579738
gaagucccuggaauaguca

SEQ ID NO: 2579740 - RNA, 19 nt, Artificial Sequence
  Description of Artificial Sequence: Synthetic oligonucleotide
  Sense strand starting at position 3205 of SEQ ID NO: 1889120
ccaguuguagcauauguca

SEQ ID NO: 2579741 - RNA, 19 nt, Artificial Sequence
  Description of Artificial Sequence: Synthetic oligonucleotide
  Antisense strand to SEQ ID NO: 2579740
ugacauaugcuacaacugg

SEQ ID NO: 2579742 - RNA, 19 nt, Artificial Sequence
  Description of Artificial Sequence: Synthetic oligonucleotide
  Sense strand starting at position 3364 of SEQ ID NO: 1889120
uccaaauaucugugagcca

SEQ ID NO: 2579743 - RNA, 19 nt, Artificial Sequence
  Description of Artificial Sequence: Synthetic oligonucleotide
  Antisense strand to SEQ ID NO: 2579742
uggcucacagauauuugga

SEQ ID NO: 2579744 - RNA, 19 nt, Artificial Sequence
  Description of Artificial Sequence: Synthetic oligonucleotide
  Sense strand starting at position 3401 of SEQ ID NO: 1889120
guauauauguaaucuugga

SEQ ID NO: 2579745 - RNA, 19 nt, Artificial Sequence
  Description of Artificial Sequence: Synthetic oligonucleotide
  Antisense strand to SEQ ID NO: 2579744
uccaagauuacauauauac

SEQ ID NO: 2579746 - RNA, 19 nt, Artificial Sequence
  Description of Artificial Sequence: Synthetic oligonucleotide
  Sense strand starting at position 3405 of SEQ ID NO: 1889120
auauguaaucuuggaauug

SEQ ID NO: 2579747 - RNA, 19 nt, Artificial Sequence
  Description of Artificial Sequence: Synthetic oligonucleotide
  Antisense strand to SEQ ID NO: 2579746
caauuccaagauuacauau

SEQ ID NO: 2579748 - RNA, 19 nt, Artificial Sequence
  Description of Artificial Sequence: Synthetic oligonucleotide
  Sense strand starting at position 3414 of SEQ ID NO: 1889120
cuuggaauugcugaaucau

SEQ ID NO: 2579749 - RNA, 19 nt, Artificial Sequence
  Description of Artificial Sequence: Synthetic oligonucleotide
  Antisense strand to SEQ ID NO: 2579748
augauucagcaauuccaag

SEQ ID NO: 2579750 - RNA, 19 nt, Artificial Sequence
  Description of Artificial Sequence: Synthetic oligonucleotide
  Sense strand starting at position 3640 of SEQ ID NO: 1889120
uuuggugagaaauguccau

SEQ ID NO: 2579751 - RNA, 19 nt, Artificial Sequence
  Description of Artificial Sequence: Synthetic oligonucleotide
  Antisense strand to SEQ ID NO: 2579750
auggacauuucucaccaaa

SEQ ID NO: 2579752 - RNA, 19 nt, Artificial Sequence
  Description of Artificial Sequence: Synthetic oligonucleotide
  Sense strand starting at position 3724 of SEQ ID NO: 1889120
ggauauuaguuucuuauca

SEQ ID NO: 2579753 - RNA, 19 nt, Artificial Sequence
  Description of Artificial Sequence: Synthetic oligonucleotide
  Antisense strand to SEQ ID NO: 2579752
ugauaagaaacuaauaucc

SEQ ID NO: 2579754 - RNA, 19 nt, Artificial Sequence
  Description of Artificial Sequence: Synthetic oligonucleotide
  Sense strand starting at position 3862 of SEQ ID NO: 1889120
gguguaguggcuuaaaccu

SEQ ID NO: 2579755 - RNA, 19 nt, Artificial Sequence
  Description of Artificial Sequence: Synthetic oligonucleotide
  Antisense strand to SEQ ID NO: 2579754
agguuuaagccacuacacc

SEQ ID NO: 2579756 - RNA, 19 nt, Artificial Sequence
  Description of Artificial Sequence: Synthetic oligonucleotide
  Sense strand starting at position 302 of SEQ ID NO: 1889121
agaucauuacaguggccau

SEQ ID NO: 2579757 - RNA, 19 nt, Artificial Sequence
  Description of Artificial Sequence: Synthetic oligonucleotide
  Antisense strand to SEQ ID NO: 2579756
auggccacuguaaugaucu

SEQ ID NO: 2579758 - RNA, 19 nt, Artificial Sequence
  Description of Artificial Sequence: Synthetic oligonucleotide
  Sense strand starting at position 342 of SEQ ID NO: 1889121
auaaguguuggauggguuu

SEQ ID NO: 2579759 - RNA, 19 nt, Artificial Sequence
  Description of Artificial Sequence: Synthetic oligonucleotide
  Antisense strand to SEQ ID NO: 2579758
aaacccauccaacacuuau

SEQ ID NO: 2579760 - RNA, 19 nt, Artificial Sequence
  Description of Artificial Sequence: Synthetic oligonucleotide
  Sense strand starting at position 517 of SEQ ID NO: 1889121
gcaugaaaugcuuauaaac

SEQ ID NO: 2579761 - RNA, 19 nt, Artificial Sequence
  Description of Artificial Sequence: Synthetic oligonucleotide
  Antisense strand to SEQ ID NO: 2579760
guuuauaagcauuucaugc

SEQ ID NO: 2579762 - RNA, 19 nt, Artificial Sequence
  Description of Artificial Sequence: Synthetic oligonucleotide
  Sense strand starting at position 589 of SEQ ID NO: 1889121
uauggauauuacuuggacu

SEQ ID NO: 2579763 - RNA, 19 nt, Artificial Sequence
  Description of Artificial Sequence: Synthetic oligonucleotide
  Antisense strand to SEQ ID NO: 2579762
aguccaaguaauauccaua

SEQ ID NO: 2579764 - RNA, 19 nt, Artificial Sequence
  Description of Artificial Sequence: Synthetic oligonucleotide
  Sense strand starting at position 673 of SEQ ID NO: 1889121
ggaguaauacuuugagcca

SEQ ID NO: 2579765 - RNA, 19 nt, Artificial Sequence
  Description of Artificial Sequence: Synthetic oligonucleotide
  Antisense strand to SEQ ID NO: 2579764
uggcucaaaguauuacucc

SEQ ID NO: 2579766 - RNA, 19 nt, Artificial Sequence
  Description of Artificial Sequence: Synthetic oligonucleotide
  Sense strand starting at position 676 of SEQ ID NO: 1889121
guaauacuuugagccauga

SEQ ID NO: 2579767 - RNA, 19 nt, Artificial Sequence
  Description of Artificial Sequence: Synthetic oligonucleotide
  Antisense strand to SEQ ID NO: 2579766
ucauggcucaaaguauuac

SEQ ID NO: 2579768 - RNA, 19 nt, Artificial Sequence
  Description of Artificial Sequence: Synthetic oligonucleotide
  Sense strand starting at position 729 of SEQ ID NO: 1889121
aggagagugucacuguaua

SEQ ID NO: 2579769 - RNA, 19 nt, Artificial Sequence
  Description of Artificial Sequence: Synthetic oligonucleotide
  Antisense strand to SEQ ID NO: 2579768
uauacagugacacucuccu

SEQ ID NO: 2579770 - RNA, 19 nt, Artificial Sequence
  Description of Artificial Sequence: Synthetic oligonucleotide
  Sense strand starting at position 1446 of SEQ ID NO: 1889121
ugauacaaacccugugaua

SEQ ID NO: 2579771 - RNA, 19 nt, Artificial Sequence
  Description of Artificial Sequence: Synthetic oligonucleotide
  Antisense strand to SEQ ID NO: 2579770
uaucacaggguuuguauca

SEQ ID NO: 2579772 - RNA, 19 nt, Artificial Sequence
  Description of Artificial Sequence: Synthetic oligonucleotide
  Sense strand starting at position 1459 of SEQ ID NO: 1889121
gugauaucucaaggcuuua

SEQ ID NO: 2579773 - RNA, 19 nt, Artificial Sequence
  Description of Artificial Sequence: Synthetic oligonucleotide
  Antisense strand to SEQ ID NO: 2579772
uaaagccuugagauaucac

SEQ ID NO: 2579774 - RNA, 19 nt, Artificial Sequence
  Description of Artificial Sequence: Synthetic oligonucleotide
  Sense strand starting at position 1615 of SEQ ID NO: 1889121
uggauauauuuagguauag

SEQ ID NO: 2579775 - RNA, 19 nt, Artificial Sequence
  Description of Artificial Sequence: Synthetic oligonucleotide
  Antisense strand to SEQ ID NO: 2579774
cuauaccuaaauauaucca

SEQ ID NO: 2579776 - RNA, 19 nt, Artificial Sequence
  Description of Artificial Sequence: Synthetic oligonucleotide
  Sense strand starting at position 1655 of SEQ ID NO: 1889121
guuugcacauguguauuua

SEQ ID NO: 2579777 - RNA, 19 nt, Artificial Sequence
  Description of Artificial Sequence: Synthetic oligonucleotide
  Antisense strand to SEQ ID NO: 2579776
uaaauacacaugugcaaac

SEQ ID NO: 2579778 - RNA, 19 nt, Artificial Sequence
  Description of Artificial Sequence: Synthetic oligonucleotide
  Sense strand starting at position 1852 of SEQ ID NO: 1889121
auguuaacugcugauaacu

SEQ ID NO: 2579779 - RNA, 19 nt, Artificial Sequence
  Description of Artificial Sequence: Synthetic oligonucleotide
  Antisense strand to SEQ ID NO: 2579778
aguuaucagcaguuaacau

SEQ ID NO: 2579780 - RNA, 19 nt, Artificial Sequence
  Description of Artificial Sequence: Synthetic oligonucleotide
  Sense strand starting at position 1931 of SEQ ID NO: 1889121
gggugucuucgucaagaga

SEQ ID NO: 2579781 - RNA, 19 nt, Artificial Sequence
  Description of Artificial Sequence: Synthetic oligonucleotide
  Antisense strand to SEQ ID NO: 2579780
ucucuugacgaagacaccc

SEQ ID NO: 2579782 - RNA, 19 nt, Artificial Sequence
  Description of Artificial Sequence: Synthetic oligonucleotide
  Sense strand starting at position 2304 of SEQ ID NO: 1889121
guggaaucuuugguuggaa

SEQ ID NO: 2579783 - RNA, 19 nt, Artificial Sequence
  Description of Artificial Sequence: Synthetic oligonucleotide
  Antisense strand to SEQ ID NO: 2579782
uuccaaccaaagauuccac

SEQ ID NO: 2579784 - RNA, 19 nt, Artificial Sequence
  Description of Artificial Sequence: Synthetic oligonucleotide
  Sense strand starting at position 2305 of SEQ ID NO: 1889121
uggaaucuuugguuggaaa

SEQ ID NO: 2579785 - RNA, 19 nt, Artificial Sequence
  Description of Artificial Sequence: Synthetic oligonucleotide
  Antisense strand to SEQ ID NO: 2579784
uuuccaaccaaagauucca

SEQ ID NO: 2579786 - RNA, 19 nt, Artificial Sequence
  Description of Artificial Sequence: Synthetic oligonucleotide
  Sense strand starting at position 2306 of SEQ ID NO: 1889121
ggaaucuuugguuggaaau

SEQ ID NO: 2579787 - RNA, 19 nt, Artificial Sequence
  Description of Artificial Sequence: Synthetic oligonucleotide
  Antisense strand to SEQ ID NO: 2579786
auuuccaaccaaagauucc

SEQ ID NO: 2579788 - RNA, 19 nt, Artificial Sequence
  Description of Artificial Sequence: Synthetic oligonucleotide
  Sense strand starting at position 2307 of SEQ ID NO: 1889121
gaaucuuugguuggaaauu

SEQ ID NO: 2579789 - RNA, 19 nt, Artificial Sequence
  Description of Artificial Sequence: Synthetic oligonucleotide
  Antisense strand to SEQ ID NO: 2579788
aauuuccaaccaaagauuc

SEQ ID NO: 2579790 - RNA, 19 nt, Artificial Sequence
  Description of Artificial Sequence: Synthetic oligonucleotide
  Sense strand starting at position 2324 of SEQ ID NO: 1889121
uugcuauuaugggucaaac

SEQ ID NO: 2579791 - RNA, 19 nt, Artificial Sequence
  Description of Artificial Sequence: Synthetic oligonucleotide
  Antisense strand to SEQ ID NO: 2579790
guuugacccauaauagcaa

SEQ ID NO: 2579792 - RNA, 19 nt, Artificial Sequence
  Description of Artificial Sequence: Synthetic oligonucleotide
  Sense strand starting at position 2326 of SEQ ID NO: 1889121
gcuauuaugggucaaacua

SEQ ID NO: 2579793 - RNA, 19 nt, Artificial Sequence
  Description of Artificial Sequence: Synthetic oligonucleotide
  Antisense strand to SEQ ID NO: 2579792
uaguuugacccauaauagc

SEQ ID NO: 2579794 - RNA, 19 nt, Artificial Sequence
  Description of Artificial Sequence: Synthetic oligonucleotide
  Sense strand starting at position 2488 of SEQ ID NO: 1889121
cuuaaauuguuagcugaga

SEQ ID NO: 2579795 - RNA, 19 nt, Artificial Sequence
  Description of Artificial Sequence: Synthetic oligonucleotide
  Antisense strand to SEQ ID NO: 2579794
ucucagcuaacaauuuaag

SEQ ID NO: 2579796 - RNA, 19 nt, Artificial Sequence
  Description of Artificial Sequence: Synthetic oligonucleotide
  Sense strand starting at position 2489 of SEQ ID NO: 1889121
uuaaauuguuagcugagaa

SEQ ID NO: 2579797 - RNA, 19 nt, Artificial Sequence
  Description of Artificial Sequence: Synthetic oligonucleotide
  Antisense strand to SEQ ID NO: 2579796
uucucagcuaacaauuuaa

SEQ ID NO: 2579798 - RNA, 19 nt, Artificial Sequence
  Description of Artificial Sequence: Synthetic oligonucleotide
  Sense strand starting at position 2497 of SEQ ID NO: 1889121
uuagcugagaagugacuaa

SEQ ID NO: 2579799 - RNA, 19 nt, Artificial Sequence
  Description of Artificial Sequence: Synthetic oligonucleotide
  Antisense strand to SEQ ID NO: 2579798
uuagucacuucucagcuaa

SEQ ID NO: 2579800 - RNA, 19 nt, Artificial Sequence
  Description of Artificial Sequence: Synthetic oligonucleotide
  Sense strand starting at position 2567 of SEQ ID NO: 1889121
ucauuaacuuccgcugaaa

SEQ ID NO: 2579801 - RNA, 19 nt, Artificial Sequence
  Description of Artificial Sequence: Synthetic oligonucleotide
  Antisense strand to SEQ ID NO: 2579800
uuucagcggaaguuaauga

SEQ ID NO: 2579802 - RNA, 19 nt, Artificial Sequence
  Description of Artificial Sequence: Synthetic oligonucleotide
  Sense strand starting at position 2606 of SEQ ID NO: 1889121
gugcuaaauuguuuacuaa

SEQ ID NO: 2579803 - RNA, 19 nt, Artificial Sequence
  Description of Artificial Sequence: Synthetic oligonucleotide
  Antisense strand to SEQ ID NO: 2579802
uuaguaaacaauuuagcac

SEQ ID NO: 2579804 - RNA, 19 nt, Artificial Sequence
  Description of Artificial Sequence: Synthetic oligonucleotide
  Sense strand starting at position 2640 of SEQ ID NO: 1889121
gcagcuaaauaauugugau

SEQ ID NO: 2579805 - RNA, 19 nt, Artificial Sequence
  Description of Artificial Sequence: Synthetic oligonucleotide
  Antisense strand to SEQ ID NO: 2579804
aucacaauuauuuagcugc

SEQ ID NO: 2579806 - RNA, 19 nt, Artificial Sequence
  Description of Artificial Sequence: Synthetic oligonucleotide
  Sense strand starting at position 2711 of SEQ ID NO: 1889121
gaagguugugcagaugaaa

SEQ ID NO: 2579807 - RNA, 19 nt, Artificial Sequence
  Description of Artificial Sequence: Synthetic oligonucleotide
  Antisense strand to SEQ ID NO: 2579806
uuucaucugcacaaccuuc

SEQ ID NO: 2579808 - RNA, 19 nt, Artificial Sequence
  Description of Artificial Sequence: Synthetic oligonucleotide
  Sense strand starting at position 2714 of SEQ ID NO: 1889121
gguugugcagaugaaauga

SEQ ID NO: 2579809 - RNA, 19 nt, Artificial Sequence
  Description of Artificial Sequence: Synthetic oligonucleotide
  Antisense strand to SEQ ID NO: 2579808
ucauuucaucugcacaacc

SEQ ID NO: 2579810 - RNA, 19 nt, Artificial Sequence
  Description of Artificial Sequence: Synthetic oligonucleotide
  Sense strand starting at position 2842 of SEQ ID NO: 1889121
gcagcuauagcuggaauuu

SEQ ID NO: 2579811 - RNA, 19 nt, Artificial Sequence
  Description of Artificial Sequence: Synthetic oligonucleotide
  Antisense strand to SEQ ID NO: 2579810
aaauuccagcuauagcugc

SEQ ID NO: 2579812 - RNA, 19 nt, Artificial Sequence
  Description of Artificial Sequence: Synthetic oligonucleotide
  Sense strand starting at position 2930 of SEQ ID NO: 1889121
aauggauucccacguaggu

SEQ ID NO: 2579813 - RNA, 19 nt, Artificial Sequence
  Description of Artificial Sequence: Synthetic oligonucleotide
  Antisense strand to SEQ ID NO: 2579812
accuacgugggaauccauu

SEQ ID NO: 2579814 - RNA, 19 nt, Artificial Sequence
  Description of Artificial Sequence: Synthetic oligonucleotide
  Sense strand starting at position 3099 of SEQ ID NO: 1889121
ugacuauggguaugaaauc

SEQ ID NO: 2579815 - RNA, 19 nt, Artificial Sequence
  Description of Artificial Sequence: Synthetic oligonucleotide
  Antisense strand to SEQ ID NO: 2579814
gauuucauacccauaguca

SEQ ID NO: 2579816 - RNA, 19 nt, Artificial Sequence
  Description of Artificial Sequence: Synthetic oligonucleotide
  Sense strand starting at position 3208 of SEQ ID NO: 1889121
guuguaaacugcuugagaa

SEQ ID NO: 2579817 - RNA, 19 nt, Artificial Sequence
  Description of Artificial Sequence: Synthetic oligonucleotide
  Antisense strand to SEQ ID NO: 2579816
uucucaagcaguuuacaac

SEQ ID NO: 2579818 - RNA, 19 nt, Artificial Sequence
  Description of Artificial Sequence: Synthetic oligonucleotide
  Sense strand starting at position 3209 of SEQ ID NO: 1889121
uuguaaacugcuugagaaa

SEQ ID NO: 2579819 - RNA, 19 nt, Artificial Sequence
  Description of Artificial Sequence: Synthetic oligonucleotide
  Antisense strand to SEQ ID NO: 2579818
uuucucaagcaguuuacaa

SEQ ID NO: 2579820 - RNA, 19 nt, Artificial Sequence
  Description of Artificial Sequence: Synthetic oligonucleotide
  Sense strand starting at position 3210 of SEQ ID NO: 1889121
uguaaacugcuugagaaau

SEQ ID NO: 2579821 - RNA, 19 nt, Artificial Sequence
  Description of Artificial Sequence: Synthetic oligonucleotide
  Antisense strand to SEQ ID NO: 2579820
auuucucaagcaguuuaca

SEQ ID NO: 2579822 - RNA, 19 nt, Artificial Sequence
  Description of Artificial Sequence: Synthetic oligonucleotide
  Sense strand starting at position 3341 of SEQ ID NO: 1889121
ccuauuuaaccuuguuguu

SEQ ID NO: 2579823 - RNA, 19 nt, Artificial Sequence
  Description of Artificial Sequence: Synthetic oligonucleotide
  Antisense strand to SEQ ID NO: 2579822
aacaacaagguuaaauagg

SEQ ID NO: 2579824 - RNA, 19 nt, Artificial Sequence
  Description of Artificial Sequence: Synthetic oligonucleotide
  Sense strand starting at position 3427 of SEQ ID NO: 1889121
accugcuaggcugggaaau

SEQ ID NO: 2579825 - RNA, 19 nt, Artificial Sequence
  Description of Artificial Sequence: Synthetic oligonucleotide
  Antisense strand to SEQ ID NO: 2579824
auuucccagccuagcaggu

SEQ ID NO: 2579826 - RNA, 19 nt, Artificial Sequence
  Description of Artificial Sequence: Synthetic oligonucleotide
  Sense strand starting at position 3455 of SEQ ID NO: 1889121
guaaauugaagguggacau

SEQ ID NO: 2579827 - RNA, 19 nt, Artificial Sequence
  Description of Artificial Sequence: Synthetic oligonucleotide
  Antisense strand to SEQ ID NO: 2579826
auguccaccuucaauuuac

SEQ ID NO: 2579828 - RNA, 19 nt, Artificial Sequence
  Description of Artificial Sequence: Synthetic oligonucleotide
  Sense strand starting at position 3465 of SEQ ID NO: 1889121
gguggacaugacuauuagu

SEQ ID NO: 2579829 - RNA, 19 nt, Artificial Sequence
  Description of Artificial Sequence: Synthetic oligonucleotide
  Antisense strand to SEQ ID NO: 2579828
acuaauagucauguccacc

SEQ ID NO: 2579830 - RNA, 19 nt, Artificial Sequence
  Description of Artificial Sequence: Synthetic oligonucleotide
  Sense strand starting at position 3759 of SEQ ID NO: 1889121
uugcuuuaagcagauucua

SEQ ID NO: 2579831 - RNA, 19 nt, Artificial Sequence
  Description of Artificial Sequence: Synthetic oligonucleotide
  Antisense strand to SEQ ID NO: 2579830
uagaaucugcuuaaagcaa

SEQ ID NO: 2579832 - RNA, 19 nt, Artificial Sequence
  Description of Artificial Sequence: Synthetic oligonucleotide
  Sense strand starting at position 3767 of SEQ ID NO: 1889121
agcagauucuacuuauagg

SEQ ID NO: 2579833 - RNA, 19 nt, Artificial Sequence
  Description of Artificial Sequence: Synthetic oligonucleotide
  Antisense strand to SEQ ID NO: 2579832
ccuauaaguagaaucugcu

SEQ ID NO: 2579834 - RNA, 19 nt, Artificial Sequence
  Description of Artificial Sequence: Synthetic oligonucleotide
  Sense strand starting at position 3953 of SEQ ID NO: 1889121
augggcuguaccuagaaau

SEQ ID NO: 2579835 - RNA, 19 nt, Artificial Sequence
  Description of Artificial Sequence: Synthetic oligonucleotide
  Antisense strand to SEQ ID NO: 2579834
auuucuagguacagcccau

SEQ ID NO: 2579836 - RNA, 19 nt, Artificial Sequence
  Description of Artificial Sequence: Synthetic oligonucleotide
  Sense strand starting at position 38 of SEQ ID NO: 1889123
gugaauauuucuuaugguu

SEQ ID NO: 2579837 - RNA, 19 nt, Artificial Sequence
  Description of Artificial Sequence: Synthetic oligonucleotide
  Antisense strand to SEQ ID NO: 2579836
aaccauaagaaauauucac

SEQ ID NO: 2579838 - RNA, 19 nt, Artificial Sequence
  Description of Artificial Sequence: Synthetic oligonucleotide
  Sense strand starting at position 107 of SEQ ID NO: 1889123
gccaaaugcucauucuuag

SEQ ID NO: 2579839 - RNA, 19 nt, Artificial Sequence
  Description of Artificial Sequence: Synthetic oligonucleotide
  Antisense strand to SEQ ID NO: 2579838
cuaagaaugagcauuuggc

SEQ ID NO: 2579840 - RNA, 19 nt, Artificial Sequence
  Description of Artificial Sequence: Synthetic oligonucleotide
  Sense strand starting at position 146 of SEQ ID NO: 1889123
guuaaucacugcuuaguua

SEQ ID NO: 2579841 - RNA, 19 nt, Artificial Sequence
  Description of Artificial Sequence: Synthetic oligonucleotide
  Antisense strand to SEQ ID NO: 2579840
uaacuaagcagugauuaac

SEQ ID NO: 2579842 - RNA, 19 nt, Artificial Sequence
  Description of Artificial Sequence: Synthetic oligonucleotide
  Sense strand starting at position 150 of SEQ ID NO: 1889123
aucacugcuuaguuauauu

SEQ ID NO: 2579843 - RNA, 19 nt, Artificial Sequence
  Description of Artificial Sequence: Synthetic oligonucleotide
  Antisense strand to SEQ ID NO: 2579842
aauauaacuaagcagugau

SEQ ID NO: 2579844 - RNA, 19 nt, Artificial Sequence
  Description of Artificial Sequence: Synthetic oligonucleotide
  Sense strand starting at position 342 of SEQ ID NO: 1889123
augacugcaugccaaauuu

SEQ ID NO: 2579845 - RNA, 19 nt, Artificial Sequence
  Description of Artificial Sequence: Synthetic oligonucleotide
  Antisense strand to SEQ ID NO: 2579844
aaauuuggcaugcagucau

SEQ ID NO: 2579846 - RNA, 19 nt, Artificial Sequence
  Description of Artificial Sequence: Synthetic oligonucleotide
  Sense strand starting at position 388 of SEQ ID NO: 1889123
aguaguuggcucuaucuua

SEQ ID NO: 2579847 - RNA, 19 nt, Artificial Sequence
  Description of Artificial Sequence: Synthetic oligonucleotide
  Antisense strand to SEQ ID NO: 2579846
uaagauagagccaacuacu

SEQ ID NO: 2579848 - RNA, 19 nt, Artificial Sequence
  Description of Artificial Sequence: Synthetic oligonucleotide
  Sense strand starting at position 441 of SEQ ID NO: 1889123
uucuaaugauggccaagaa

SEQ ID NO: 2579849 - RNA, 19 nt, Artificial Sequence
  Description of Artificial Sequence: Synthetic oligonucleotide
  Antisense strand to SEQ ID NO: 2579848
uucuuggccaucauuagaa

SEQ ID NO: 2579850 - RNA, 19 nt, Artificial Sequence
  Description of Artificial Sequence: Synthetic oligonucleotide
  Sense strand starting at position 493 of SEQ ID NO: 1889123
gggucauuacaacacuguu

SEQ ID NO: 2579851 - RNA, 19 nt, Artificial Sequence
  Description of Artificial Sequence: Synthetic oligonucleotide
  Antisense strand to SEQ ID NO: 2579850
aacaguguuguaaugaccc

SEQ ID NO: 2579852 - RNA, 19 nt, Artificial Sequence
  Description of Artificial Sequence: Synthetic oligonucleotide
  Sense strand starting at position 616 of SEQ ID NO: 1889123
uggaaauguguuggcuucu

SEQ ID NO: 2579853 - RNA, 19 nt, Artificial Sequence
  Description of Artificial Sequence: Synthetic oligonucleotide
  Antisense strand to SEQ ID NO: 2579852
agaagccaacacauuucca

SEQ ID NO: 2579854 - RNA, 19 nt, Artificial Sequence
  Description of Artificial Sequence: Synthetic oligonucleotide
  Sense strand starting at position 629 of SEQ ID NO: 1889123
gcuucuguauccugaaguc

SEQ ID NO: 2579855 - RNA, 19 nt, Artificial Sequence
  Description of Artificial Sequence: Synthetic oligonucleotide
  Antisense strand to SEQ ID NO: 2579854
gacuucaggauacagaagc

SEQ ID NO: 2579856 - RNA, 19 nt, Artificial Sequence
  Description of Artificial Sequence: Synthetic oligonucleotide
  Sense strand starting at position 913 of SEQ ID NO: 1889123
accucaugugcuuagaucu

SEQ ID NO: 2579857 - RNA, 19 nt, Artificial Sequence
  Description of Artificial Sequence: Synthetic oligonucleotide
  Antisense strand to SEQ ID NO: 2579856
agaucuaagcacaugaggu

SEQ ID NO: 2579858 - RNA, 19 nt, Artificial Sequence
  Description of Artificial Sequence: Synthetic oligonucleotide
  Sense strand starting at position 974 of SEQ ID NO: 1889123
uuguguuaauguuuaagca

SEQ ID NO: 2579859 - RNA, 19 nt, Artificial Sequence
  Description of Artificial Sequence: Synthetic oligonucleotide
  Antisense strand to SEQ ID NO: 2579858
ugcuuaaacauuaacacaa

SEQ ID NO: 2579860 - RNA, 19 nt, Artificial Sequence
  Description of Artificial Sequence: Synthetic oligonucleotide
  Sense strand starting at position 984 of SEQ ID NO: 1889123
guuuaagcauccuggaaca

SEQ ID NO: 2579861 - RNA, 19 nt, Artificial Sequence
  Description of Artificial Sequence: Synthetic oligonucleotide
  Antisense strand to SEQ ID NO: 2579860
uguuccaggaugcuuaaac

SEQ ID NO: 2579862 - RNA, 19 nt, Artificial Sequence
  Description of Artificial Sequence: Synthetic oligonucleotide
  Sense strand starting at position 1154 of SEQ ID NO: 1889123
gcuaaauguucuugcaguu

SEQ ID NO: 2579863 - RNA, 19 nt, Artificial Sequence
  Description of Artificial Sequence: Synthetic oligonucleotide
  Antisense strand to SEQ ID NO: 2579862
aacugcaagaacauuuagc

SEQ ID NO: 2579864 - RNA, 19 nt, Artificial Sequence
  Description of Artificial Sequence: Synthetic oligonucleotide
  Sense strand starting at position 1175 of SEQ ID NO: 1889123
uuugaaucuuuguauaagc

SEQ ID NO: 2579865 - RNA, 19 nt, Artificial Sequence
  Description of Artificial Sequence: Synthetic oligonucleotide
  Antisense strand to SEQ ID NO: 2579864
gcuuauacaaagauucaaa

SEQ ID NO: 2579866 - RNA, 19 nt, Artificial Sequence
  Description of Artificial Sequence: Synthetic oligonucleotide
  Sense strand starting at position 1184 of SEQ ID NO: 1889123
uuguauaagcaguaacgau

SEQ ID NO: 2579867 - RNA, 19 nt, Artificial Sequence
  Description of Artificial Sequence: Synthetic oligonucleotide
  Antisense strand to SEQ ID NO: 2579866
aucguuacugcuuauacaa

SEQ ID NO: 2579868 - RNA, 19 nt, Artificial Sequence
  Description of Artificial Sequence: Synthetic oligonucleotide
  Sense strand starting at position 1193 of SEQ ID NO: 1889123
caguaacgaugucuugcau

SEQ ID NO: 2579869 - RNA, 19 nt, Artificial Sequence
  Description of Artificial Sequence: Synthetic oligonucleotide
  Antisense strand to SEQ ID NO: 2579868
augcaagacaucguuacug

SEQ ID NO: 2579870 - RNA, 19 nt, Artificial Sequence
  Description of Artificial Sequence: Synthetic oligonucleotide
  Sense strand starting at position 1197 of SEQ ID NO: 1889123
aacgaugucuugcauauaa

SEQ ID NO: 2579871 - RNA, 19 nt, Artificial Sequence
  Description of Artificial Sequence: Synthetic oligonucleotide
  Antisense strand to SEQ ID NO: 2579870
uuauaugcaagacaucguu

SEQ ID NO: 2579872 - RNA, 19 nt, Artificial Sequence
  Description of Artificial Sequence: Synthetic oligonucleotide
  Sense strand starting at position 1214 of SEQ ID NO: 1889123
aagcauuacugaggucuca

SEQ ID NO: 2579873 - RNA, 19 nt, Artificial Sequence
  Description of Artificial Sequence: Synthetic oligonucleotide
  Antisense strand to SEQ ID NO: 2579872
ugagaccucaguaaugcuu

SEQ ID NO: 2579874 - RNA, 19 nt, Artificial Sequence
  Description of Artificial Sequence: Synthetic oligonucleotide
  Sense strand starting at position 1311 of SEQ ID NO: 1889123
gggcuuugacaauguagug

SEQ ID NO: 2579875 - RNA, 19 nt, Artificial Sequence
  Description of Artificial Sequence: Synthetic oligonucleotide
  Antisense strand to SEQ ID NO: 2579874
cacuacauugucaaagccc

SEQ ID NO: 2579876 - RNA, 19 nt, Artificial Sequence
  Description of Artificial Sequence: Synthetic oligonucleotide
  Sense strand starting at position 1321 of SEQ ID NO: 1889123
aauguagugacagguuuga

SEQ ID NO: 2579877 - RNA, 19 nt, Artificial Sequence
  Description of Artificial Sequence: Synthetic oligonucleotide
  Antisense strand to SEQ ID NO: 2579876
ucaaaccugucacuacauu

SEQ ID NO: 2579878 - RNA, 19 nt, Artificial Sequence
  Description of Artificial Sequence: Synthetic oligonucleotide
  Sense strand starting at position 1325 of SEQ ID NO: 1889123
uagugacagguuugacaau

SEQ ID NO: 2579879 - RNA, 19 nt, Artificial Sequence
  Description of Artificial Sequence: Synthetic oligonucleotide
  Antisense strand to SEQ ID NO: 2579878
auugucaaaccugucacua

SEQ ID NO: 2579880 - RNA, 19 nt, Artificial Sequence
  Description of Artificial Sequence: Synthetic oligonucleotide
  Sense strand starting at position 1457 of SEQ ID NO: 1889123
ccagaaauuugagaccguu

SEQ ID NO: 2579881 - RNA, 19 nt, Artificial Sequence
  Description of Artificial Sequence: Synthetic oligonucleotide
  Antisense strand to SEQ ID NO: 2579880
aacggucucaaauuucugg

SEQ ID NO: 2579882 - RNA, 19 nt, Artificial Sequence
  Description of Artificial Sequence: Synthetic oligonucleotide
  Sense strand starting at position 1473 of SEQ ID NO: 1889123
guuguaagccaucaucuca

SEQ ID NO: 2579883 - RNA, 19 nt, Artificial Sequence
  Description of Artificial Sequence: Synthetic oligonucleotide
  Antisense strand to SEQ ID NO: 2579882
ugagaugauggcuuacaac

SEQ ID NO: 2579884 - RNA, 19 nt, Artificial Sequence
  Description of Artificial Sequence: Synthetic oligonucleotide
  Sense strand starting at position 1628 of SEQ ID NO: 1889123
agaauauugcuaggaacuu

SEQ ID NO: 2579885 - RNA, 19 nt, Artificial Sequence
  Description of Artificial Sequence: Synthetic oligonucleotide
  Antisense strand to SEQ ID NO: 2579884
aaguuccuagcaauauucu

SEQ ID NO: 2579886 - RNA, 19 nt, Artificial Sequence
  Description of Artificial Sequence: Synthetic oligonucleotide
  Sense strand starting at position 1688 of SEQ ID NO: 1889123
aaggaauguuguccucacu

SEQ ID NO: 2579887 - RNA, 19 nt, Artificial Sequence
  Description of Artificial Sequence: Synthetic oligonucleotide
  Antisense strand to SEQ ID NO: 2579886
agugaggacaacauuccuu

SEQ ID NO: 2579888 - RNA, 19 nt, Artificial Sequence
  Description of Artificial Sequence: Synthetic oligonucleotide
  Sense strand starting at position 1760 of SEQ ID NO: 1889123
ucugaaauguacccaguga

SEQ ID NO: 2579889 - RNA, 19 nt, Artificial Sequence
  Description of Artificial Sequence: Synthetic oligonucleotide
  Antisense strand to SEQ ID NO: 2579888
ucacuggguacauuucaga

SEQ ID NO: 2579890 - RNA, 19 nt, Artificial Sequence
  Description of Artificial Sequence: Synthetic oligonucleotide
  Sense strand starting at position 1764 of SEQ ID NO: 1889123
aaauguacccagugagaua

SEQ ID NO: 2579891 - RNA, 19 nt, Artificial Sequence
  Description of Artificial Sequence: Synthetic oligonucleotide
  Antisense strand to SEQ ID NO: 2579890
uaucucacuggguacauuu

SEQ ID NO: 2579892 - RNA, 19 nt, Artificial Sequence
  Description of Artificial Sequence: Synthetic oligonucleotide
  Sense strand starting at position 1795 of SEQ ID NO: 1889123
aaagcuaucgaucaguaau

SEQ ID NO: 2579893 - RNA, 19 nt, Artificial Sequence
  Description of Artificial Sequence: Synthetic oligonucleotide
  Antisense strand to SEQ ID NO: 2579892
auuacugaucgauagcuuu

SEQ ID NO: 2579894 - RNA, 19 nt, Artificial Sequence
  Description of Artificial Sequence: Synthetic oligonucleotide
  Sense strand starting at position 1797 of SEQ ID NO: 1889123
agcuaucgaucaguaauua

SEQ ID NO: 2579895 - RNA, 19 nt, Artificial Sequence
  Description of Artificial Sequence: Synthetic oligonucleotide
  Antisense strand to SEQ ID NO: 2579894
uaauuacugaucgauagcu

SEQ ID NO: 2579896 - RNA, 19 nt, Artificial Sequence
  Description of Artificial Sequence: Synthetic oligonucleotide
  Sense strand starting at position 1798 of SEQ ID NO: 1889123
gcuaucgaucaguaauuau

SEQ ID NO: 2579897 - RNA, 19 nt, Artificial Sequence
  Description of Artificial Sequence: Synthetic oligonucleotide
  Antisense strand to SEQ ID NO: 2579896
auaauuacugaucgauagc

SEQ ID NO: 2579898 - RNA, 19 nt, Artificial Sequence
  Description of Artificial Sequence: Synthetic oligonucleotide
  Sense strand starting at position 1808 of SEQ ID NO: 1889123
aguaauuaugcccauguau

SEQ ID NO: 2579899 - RNA, 19 nt, Artificial Sequence
  Description of Artificial Sequence: Synthetic oligonucleotide
  Antisense strand to SEQ ID NO: 2579898
auacaugggcauaauuacu

SEQ ID NO: 2579900 - RNA, 19 nt, Artificial Sequence
  Description of Artificial Sequence: Synthetic oligonucleotide
  Sense strand starting at position 1819 of SEQ ID NO: 1889123
ccauguaugugucacuucu

SEQ ID NO: 2579901 - RNA, 19 nt, Artificial Sequence
  Description of Artificial Sequence: Synthetic oligonucleotide
  Antisense strand to SEQ ID NO: 2579900
agaagugacacauacaugg

SEQ ID NO: 2579902 - RNA, 19 nt, Artificial Sequence
  Description of Artificial Sequence: Synthetic oligonucleotide
  Sense strand starting at position 1908 of SEQ ID NO: 1889123
gucuuucuaucagauagca

SEQ ID NO: 2579903 - RNA, 19 nt, Artificial Sequence
  Description of Artificial Sequence: Synthetic oligonucleotide
  Antisense strand to SEQ ID NO: 2579902
ugcuaucugauagaaagac

SEQ ID NO: 2579904 - RNA, 19 nt, Artificial Sequence
  Description of Artificial Sequence: Synthetic oligonucleotide
  Sense strand starting at position 2029 of SEQ ID NO: 1889123
uagaauggguugccuagaa

SEQ ID NO: 2579905 - RNA, 19 nt, Artificial Sequence
  Description of Artificial Sequence: Synthetic oligonucleotide
  Antisense strand to SEQ ID NO: 2579904
uucuaggcaacccauucua

SEQ ID NO: 2579906 - RNA, 19 nt, Artificial Sequence
  Description of Artificial Sequence: Synthetic oligonucleotide
  Sense strand starting at position 2052 of SEQ ID NO: 1889123
ucguguugagaucaagaga

SEQ ID NO: 2579907 - RNA, 19 nt, Artificial Sequence
  Description of Artificial Sequence: Synthetic oligonucleotide
  Antisense strand to SEQ ID NO: 2579906
ucucuugaucucaacacga

SEQ ID NO: 2579908 - RNA, 19 nt, Artificial Sequence
  Description of Artificial Sequence: Synthetic oligonucleotide
  Sense strand starting at position 2063 of SEQ ID NO: 1889123
ucaagagaguaugcaucau

SEQ ID NO: 2579909 - RNA, 19 nt, Artificial Sequence
  Description of Artificial Sequence: Synthetic oligonucleotide
  Antisense strand to SEQ ID NO: 2579908
augaugcauacucucuuga

SEQ ID NO: 2579910 - RNA, 19 nt, Artificial Sequence
  Description of Artificial Sequence: Synthetic oligonucleotide
  Sense strand starting at position 2067 of SEQ ID NO: 1889123
gagaguaugcaucaucauc

SEQ ID NO: 2579911 - RNA, 19 nt, Artificial Sequence
  Description of Artificial Sequence: Synthetic oligonucleotide
  Antisense strand to SEQ ID NO: 2579910
gaugaugaugcauacucuc

SEQ ID NO: 2579912 - RNA, 19 nt, Artificial Sequence
  Description of Artificial Sequence: Synthetic oligonucleotide
  Sense strand starting at position 2413 of SEQ ID NO: 1889123
cuguuuauaucauuguguu

SEQ ID NO: 2579913 - RNA, 19 nt, Artificial Sequence
  Description of Artificial Sequence: Synthetic oligonucleotide
  Antisense strand to SEQ ID NO: 2579912
aacacaaugauauaaacag

SEQ ID NO: 2579914 - RNA, 19 nt, Artificial Sequence
  Description of Artificial Sequence: Synthetic oligonucleotide
  Sense strand starting at position 4 of SEQ ID NO: 1889124
gugggugacagugaaauau

SEQ ID NO: 2579915 - RNA, 19 nt, Artificial Sequence
  Description of Artificial Sequence: Synthetic oligonucleotide
  Antisense strand to SEQ ID NO: 2579914
auauuucacugucacccac

SEQ ID NO: 2579916 - RNA, 19 nt, Artificial Sequence
  Description of Artificial Sequence: Synthetic oligonucleotide
  Sense strand starting at position 13 of SEQ ID NO: 1889124
agugaaauauggccagguu

SEQ ID NO: 2579917 - RNA, 19 nt, Artificial Sequence
  Description of Artificial Sequence: Synthetic oligonucleotide
  Antisense strand to SEQ ID NO: 2579916
aaccuggccauauuucacu

SEQ ID NO: 2579918 - RNA, 19 nt, Artificial Sequence
  Description of Artificial Sequence: Synthetic oligonucleotide
  Sense strand starting at position 14 of SEQ ID NO: 1889124
gugaaauauggccagguuc

SEQ ID NO: 2579919 - RNA, 19 nt, Artificial Sequence
  Description of Artificial Sequence: Synthetic oligonucleotide
  Antisense strand to SEQ ID NO: 2579918
gaaccuggccauauuucac

SEQ ID NO: 2579920 - RNA, 19 nt, Artificial Sequence
  Description of Artificial Sequence: Synthetic oligonucleotide
  Sense strand starting at position 16 of SEQ ID NO: 1889124
gaaauauggccagguucuu

SEQ ID NO: 2579921 - RNA, 19 nt, Artificial Sequence
  Description of Artificial Sequence: Synthetic oligonucleotide
  Antisense strand to SEQ ID NO: 2579920
aagaaccuggccauauuuc

SEQ ID NO: 2579922 - RNA, 19 nt, Artificial Sequence
  Description of Artificial Sequence: Synthetic oligonucleotide
  Sense strand starting at position 208 of SEQ ID NO: 1889124
cugaaauguuugucaggua

SEQ ID NO: 2579923 - RNA, 19 nt, Artificial Sequence
  Description of Artificial Sequence: Synthetic oligonucleotide
  Antisense strand to SEQ ID NO: 2579922
uaccugacaaacauuucag

SEQ ID NO: 2579924 - RNA, 19 nt, Artificial Sequence
  Description of Artificial Sequence: Synthetic oligonucleotide
  Sense strand starting at position 314 of SEQ ID NO: 1889124
ccaagccacguuuagagau

SEQ ID NO: 2579925 - RNA, 19 nt, Artificial Sequence
  Description of Artificial Sequence: Synthetic oligonucleotide
  Antisense strand to SEQ ID NO: 2579924
aucucuaaacguggcuugg

SEQ ID NO: 2579926 - RNA, 19 nt, Artificial Sequence
  Description of Artificial Sequence: Synthetic oligonucleotide
  Sense strand starting at position 327 of SEQ ID NO: 1889124
agagauuucugucacagga

SEQ ID NO: 2579927 - RNA, 19 nt, Artificial Sequence
  Description of Artificial Sequence: Synthetic oligonucleotide
  Antisense strand to SEQ ID NO: 2579926
uccugugacagaaaucucu

SEQ ID NO: 2579928 - RNA, 19 nt, Artificial Sequence
  Description of Artificial Sequence: Synthetic oligonucleotide
  Sense strand starting at position 456 of SEQ ID NO: 1889124
ccuggaagccaauaauucu

SEQ ID NO: 2579929 - RNA, 19 nt, Artificial Sequence
  Description of Artificial Sequence: Synthetic oligonucleotide
  Antisense strand to SEQ ID NO: 2579928
agaauuauuggcuuccagg

SEQ ID NO: 2579930 - RNA, 19 nt, Artificial Sequence
  Description of Artificial Sequence: Synthetic oligonucleotide
  Sense strand starting at position 464 of SEQ ID NO: 1889124
ccaauaauucuguggugag

SEQ ID NO: 2579931 - RNA, 19 nt, Artificial Sequence
  Description of Artificial Sequence: Synthetic oligonucleotide
  Antisense strand to SEQ ID NO: 2579930
cucaccacagaauuauugg

SEQ ID NO: 2579932 - RNA, 19 nt, Artificial Sequence
  Description of Artificial Sequence: Synthetic oligonucleotide
  Sense strand starting at position 482 of SEQ ID NO: 1889124
gagguagccucauccaaca

SEQ ID NO: 2579933 - RNA, 19 nt, Artificial Sequence
  Description of Artificial Sequence: Synthetic oligonucleotide
  Antisense strand to SEQ ID NO: 2579932
uguuggaugaggcuaccuc

SEQ ID NO: 2579934 - RNA, 19 nt, Artificial Sequence
  Description of Artificial Sequence: Synthetic oligonucleotide
  Sense strand starting at position 595 of SEQ ID NO: 1889124
cugcuucuccuacagguau

SEQ ID NO: 2579935 - RNA, 19 nt, Artificial Sequence
  Description of Artificial Sequence: Synthetic oligonucleotide
  Antisense strand to SEQ ID NO: 2579934
auaccuguaggagaagcag

SEQ ID NO: 2579936 - RNA, 19 nt, Artificial Sequence
  Description of Artificial Sequence: Synthetic oligonucleotide
  Sense strand starting at position 691 of SEQ ID NO: 1889124
aucgaaacugccuagucau

SEQ ID NO: 2579937 - RNA, 19 nt, Artificial Sequence
  Description of Artificial Sequence: Synthetic oligonucleotide
  Antisense strand to SEQ ID NO: 2579936
augacuaggcaguuucgau

SEQ ID NO: 2579938 - RNA, 19 nt, Artificial Sequence
  Description of Artificial Sequence: Synthetic oligonucleotide
  Sense strand starting at position 746 of SEQ ID NO: 1889124
aauggauuacuuugagggu

SEQ ID NO: 2579939 - RNA, 19 nt, Artificial Sequence
  Description of Artificial Sequence: Synthetic oligonucleotide
  Antisense strand to SEQ ID NO: 2579938
acccucaaaguaauccauu

SEQ ID NO: 2579940 - RNA, 19 nt, Artificial Sequence
  Description of Artificial Sequence: Synthetic oligonucleotide
  Sense strand starting at position 750 of SEQ ID NO: 1889124
gauuacuuugagggucauc

SEQ ID NO: 2579941 - RNA, 19 nt, Artificial Sequence
  Description of Artificial Sequence: Synthetic oligonucleotide
  Antisense strand to SEQ ID NO: 2579940
gaugacccucaaaguaauc

SEQ ID NO: 2579942 - RNA, 19 nt, Artificial Sequence
  Description of Artificial Sequence: Synthetic oligonucleotide
  Sense strand starting at position 774 of SEQ ID NO: 1889124
ugaagugguaaaugguuaa

SEQ ID NO: 2579943 - RNA, 19 nt, Artificial Sequence
  Description of Artificial Sequence: Synthetic oligonucleotide
  Antisense strand to SEQ ID NO: 2579942
uuaaccauuuaccacuuca

SEQ ID NO: 2579944 - RNA, 19 nt, Artificial Sequence
  Description of Artificial Sequence: Synthetic oligonucleotide
  Sense strand starting at position 784 of SEQ ID NO: 1889124
aaugguuaacguggaagau

SEQ ID NO: 2579945 - RNA, 19 nt, Artificial Sequence
  Description of Artificial Sequence: Synthetic oligonucleotide
  Antisense strand to SEQ ID NO: 2579944
aucuuccacguuaaccauu

SEQ ID NO: 2579946 - RNA, 19 nt, Artificial Sequence
  Description of Artificial Sequence: Synthetic oligonucleotide
  Sense strand starting at position 822 of SEQ ID NO: 1889124
aacuuaggccgaugaggua

SEQ ID NO: 2579947 - RNA, 19 nt, Artificial Sequence
  Description of Artificial Sequence: Synthetic oligonucleotide
  Antisense strand to SEQ ID NO: 2579946
uaccucaucggccuaaguu

SEQ ID NO: 2579948 - RNA, 19 nt, Artificial Sequence
  Description of Artificial Sequence: Synthetic oligonucleotide
  Sense strand starting at position 920 of SEQ ID NO: 1889124
cugguaugauaguccucaa

SEQ ID NO: 2579949 - RNA, 19 nt, Artificial Sequence
  Description of Artificial Sequence: Synthetic oligonucleotide
  Antisense strand to SEQ ID NO: 2579948
uugaggacuaucauaccag

SEQ ID NO: 2579950 - RNA, 19 nt, Artificial Sequence
  Description of Artificial Sequence: Synthetic oligonucleotide
  Sense strand starting at position 923 of SEQ ID NO: 1889124
guaugauaguccucaaaua

SEQ ID NO: 2579951 - RNA, 19 nt, Artificial Sequence
  Description of Artificial Sequence: Synthetic oligonucleotide
  Antisense strand to SEQ ID NO: 2579950
uauuugaggacuaucauac

SEQ ID NO: 2579952 - RNA, 19 nt, Artificial Sequence
  Description of Artificial Sequence: Synthetic oligonucleotide
  Sense strand starting at position 1037 of SEQ ID NO: 1889124
uguguaauuaaggaaaugu

SEQ ID NO: 2579953 - RNA, 19 nt, Artificial Sequence
  Description of Artificial Sequence: Synthetic oligonucleotide
  Antisense strand to SEQ ID NO: 2579952
acauuuccuuaauuacaca

SEQ ID NO: 2579954 - RNA, 19 nt, Artificial Sequence
  Description of Artificial Sequence: Synthetic oligonucleotide
  Sense strand starting at position 1069 of SEQ ID NO: 1889124
gaagcacauucugugacau

SEQ ID NO: 2579955 - RNA, 19 nt, Artificial Sequence
  Description of Artificial Sequence: Synthetic oligonucleotide
  Antisense strand to SEQ ID NO: 2579954
augucacagaaugugcuuc

SEQ ID NO: 2579956 - RNA, 19 nt, Artificial Sequence
  Description of Artificial Sequence: Synthetic oligonucleotide
  Sense strand starting at position 1839 of SEQ ID NO: 1889124
ccuuuaggauuguuaggga

SEQ ID NO: 2579957 - RNA, 19 nt, Artificial Sequence
  Description of Artificial Sequence: Synthetic oligonucleotide
  Antisense strand to SEQ ID NO: 2579956
ucccuaacaauccuaaagg

SEQ ID NO: 2579958 - RNA, 19 nt, Artificial Sequence
  Description of Artificial Sequence: Synthetic oligonucleotide
  Sense strand starting at position 1939 of SEQ ID NO: 1889124
ugggacucucccgaggauu

SEQ ID NO: 2579959 - RNA, 19 nt, Artificial Sequence
  Description of Artificial Sequence: Synthetic oligonucleotide
  Antisense strand to SEQ ID NO: 2579958
aauccucgggagaguccca

SEQ ID NO: 2579960 - RNA, 19 nt, Artificial Sequence
  Description of Artificial Sequence: Synthetic oligonucleotide
  Sense strand starting at position 2040 of SEQ ID NO: 1889124
ggcaaagaguuauugauug

SEQ ID NO: 2579961 - RNA, 19 nt, Artificial Sequence
  Description of Artificial Sequence: Synthetic oligonucleotide
  Antisense strand to SEQ ID NO: 2579960
caaucaauaacucuuugcc

SEQ ID NO: 2579962 - RNA, 19 nt, Artificial Sequence
  Description of Artificial Sequence: Synthetic oligonucleotide
  Sense strand starting at position 2044 of SEQ ID NO: 1889124
aagaguuauugauugugau

SEQ ID NO: 2579963 - RNA, 19 nt, Artificial Sequence
  Description of Artificial Sequence: Synthetic oligonucleotide
  Antisense strand to SEQ ID NO: 2579962
aucacaaucaauaacucuu

SEQ ID NO: 2579964 - RNA, 19 nt, Artificial Sequence
  Description of Artificial Sequence: Synthetic oligonucleotide
  Sense strand starting at position 2045 of SEQ ID NO: 1889124
agaguuauugauugugaug

SEQ ID NO: 2579965 - RNA, 19 nt, Artificial Sequence
  Description of Artificial Sequence: Synthetic oligonucleotide
  Antisense strand to SEQ ID NO: 2579964
caucacaaucaauaacucu

SEQ ID NO: 2579966 - RNA, 19 nt, Artificial Sequence
  Description of Artificial Sequence: Synthetic oligonucleotide
  Sense strand starting at position 2057 of SEQ ID NO: 1889124
ugugaugcaagccaaagau

SEQ ID NO: 2579967 - RNA, 19 nt, Artificial Sequence
  Description of Artificial Sequence: Synthetic oligonucleotide
  Antisense strand to SEQ ID NO: 2579966
aucuuuggcuugcaucaca

SEQ ID NO: 2579968 - RNA, 19 nt, Artificial Sequence
  Description of Artificial Sequence: Synthetic oligonucleotide
  Sense strand starting at position 2434 of SEQ ID NO: 1889124
gugucauggaaucauaagu

SEQ ID NO: 2579969 - RNA, 19 nt, Artificial Sequence
  Description of Artificial Sequence: Synthetic oligonucleotide
  Antisense strand to SEQ ID NO: 2579968
acuuaugauuccaugacac

SEQ ID NO: 2579970 - RNA, 19 nt, Artificial Sequence
  Description of Artificial Sequence: Synthetic oligonucleotide
  Sense strand starting at position 2465 of SEQ ID NO: 1889124
gugguugucagugaaauau

SEQ ID NO: 2579971 - RNA, 19 nt, Artificial Sequence
  Description of Artificial Sequence: Synthetic oligonucleotide
  Antisense strand to SEQ ID NO: 2579970
auauuucacugacaaccac

SEQ ID NO: 2579972 - RNA, 19 nt, Artificial Sequence
  Description of Artificial Sequence: Synthetic oligonucleotide
  Sense strand starting at position 2565 of SEQ ID NO: 1889124
gcaagucuaagauggauca

SEQ ID NO: 2579973 - RNA, 19 nt, Artificial Sequence
  Description of Artificial Sequence: Synthetic oligonucleotide
  Antisense strand to SEQ ID NO: 2579972
ugauccaucuuagacuugc

SEQ ID NO: 2579974 - RNA, 19 nt, Artificial Sequence
  Description of Artificial Sequence: Synthetic oligonucleotide
  Sense strand starting at position 2627 of SEQ ID NO: 1889124
guugacacauugucuuaga

SEQ ID NO: 2579975 - RNA, 19 nt, Artificial Sequence
  Description of Artificial Sequence: Synthetic oligonucleotide
  Antisense strand to SEQ ID NO: 2579974
ucuaagacaaugugucaac

SEQ ID NO: 2579976 - RNA, 19 nt, Artificial Sequence
  Description of Artificial Sequence: Synthetic oligonucleotide
  Sense strand starting at position 3101 of SEQ ID NO: 1889124
gaacaagaguuucccuguu

SEQ ID NO: 2579977 - RNA, 19 nt, Artificial Sequence
  Description of Artificial Sequence: Synthetic oligonucleotide
  Antisense strand to SEQ ID NO: 2579976
aacagggaaacucuuguuc

SEQ ID NO: 2579978 - RNA, 19 nt, Artificial Sequence
  Description of Artificial Sequence: Synthetic oligonucleotide
  Sense strand starting at position 3154 of SEQ ID NO: 1889124
auuacagaugcccagucau

SEQ ID NO: 2579979 - RNA, 19 nt, Artificial Sequence
  Description of Artificial Sequence: Synthetic oligonucleotide
  Antisense strand to SEQ ID NO: 2579978
augacugggcaucuguaau

SEQ ID NO: 2579980 - RNA, 19 nt, Artificial Sequence
  Description of Artificial Sequence: Synthetic oligonucleotide
  Sense strand starting at position 3213 of SEQ ID NO: 1889124
gcgaauaugcaugacucca

SEQ ID NO: 2579981 - RNA, 19 nt, Artificial Sequence
  Description of Artificial Sequence: Synthetic oligonucleotide
  Antisense strand to SEQ ID NO: 2579980
uggagucaugcauauucgc

SEQ ID NO: 2579982 - RNA, 19 nt, Artificial Sequence
  Description of Artificial Sequence: Synthetic oligonucleotide
  Sense strand starting at position 3284 of SEQ ID NO: 1889124
guacucuguguccaagaau

SEQ ID NO: 2579983 - RNA, 19 nt, Artificial Sequence
  Description of Artificial Sequence: Synthetic oligonucleotide
  Antisense strand to SEQ ID NO: 2579982
auucuuggacacagaguac

SEQ ID NO: 2579984 - RNA, 19 nt, Artificial Sequence
  Description of Artificial Sequence: Synthetic oligonucleotide
  Sense strand starting at position 3316 of SEQ ID NO: 1889124
aauggaggauugucccauu

SEQ ID NO: 2579985 - RNA, 19 nt, Artificial Sequence
  Description of Artificial Sequence: Synthetic oligonucleotide
  Antisense strand to SEQ ID NO: 2579984
aaugggacaauccuccauu

SEQ ID NO: 2579986 - RNA, 19 nt, Artificial Sequence
  Description of Artificial Sequence: Synthetic oligonucleotide
  Sense strand starting at position 3517 of SEQ ID NO: 1889124
uuugcagugggacauaauu

SEQ ID NO: 2579987 - RNA, 19 nt, Artificial Sequence
  Description of Artificial Sequence: Synthetic oligonucleotide
  Antisense strand to SEQ ID NO: 2579986
aauuaugucccacugcaaa

SEQ ID NO: 2579988 - RNA, 19 nt, Artificial Sequence
  Description of Artificial Sequence: Synthetic oligonucleotide
  Sense strand starting at position 3606 of SEQ ID NO: 1889124
guuguaaucccauagacca

SEQ ID NO: 2579989 - RNA, 19 nt, Artificial Sequence
  Description of Artificial Sequence: Synthetic oligonucleotide
  Antisense strand to SEQ ID NO: 2579988
uggucuaugggauuacaac

SEQ ID NO: 2579990 - RNA, 19 nt, Artificial Sequence
  Description of Artificial Sequence: Synthetic oligonucleotide
  Sense strand starting at position 3693 of SEQ ID NO: 1889124
gccacauuccuuuaagaga

SEQ ID NO: 2579991 - RNA, 19 nt, Artificial Sequence
  Description of Artificial Sequence: Synthetic oligonucleotide
  Antisense strand to SEQ ID NO: 2579990
ucucuuaaaggaauguggc

SEQ ID NO: 2579992 - RNA, 19 nt, Artificial Sequence
  Description of Artificial Sequence: Synthetic oligonucleotide
  Sense strand starting at position 3871 of SEQ ID NO: 1889124
uagaaaucacaguguggca

SEQ ID NO: 2579993 - RNA, 19 nt, Artificial Sequence
  Description of Artificial Sequence: Synthetic oligonucleotide
  Antisense strand to SEQ ID NO: 2579992
ugccacacugugauuucua

SEQ ID NO: 2579994 - RNA, 19 nt, Artificial Sequence
  Description of Artificial Sequence: Synthetic oligonucleotide
  Sense strand starting at position 5 of SEQ ID NO: 1889125
gugggugacagugaaauau

SEQ ID NO: 2579995 - RNA, 19 nt, Artificial Sequence
  Description of Artificial Sequence: Synthetic oligonucleotide
  Antisense strand to SEQ ID NO: 2579994
auauuucacugucacccac

SEQ ID NO: 2579996 - RNA, 19 nt, Artificial Sequence
  Description of Artificial Sequence: Synthetic oligonucleotide
  Sense strand starting at position 14 of SEQ ID NO: 1889125
agugaaauauggccagguu

SEQ ID NO: 2579997 - RNA, 19 nt, Artificial Sequence
  Description of Artificial Sequence: Synthetic oligonucleotide
  Antisense strand to SEQ ID NO: 2579996
aaccuggccauauuucacu

SEQ ID NO: 2579998 - RNA, 19 nt, Artificial Sequence
  Description of Artificial Sequence: Synthetic oligonucleotide
  Sense strand starting at position 15 of SEQ ID NO: 1889125
gugaaauauggccagguuc

SEQ ID NO: 2579999 - RNA, 19 nt, Artificial Sequence
  Description of Artificial Sequence: Synthetic oligonucleotide
  Antisense strand to SEQ ID NO: 2579998
gaaccuggccauauuucac

SEQ ID NO: 2580000 - RNA, 19 nt, Artificial Sequence
  Description of Artificial Sequence: Synthetic oligonucleotide
  Sense strand starting at position 17 of SEQ ID NO: 1889125
gaaauauggccagguucuu

SEQ ID NO: 2580001 - RNA, 19 nt, Artificial Sequence
  Description of Artificial Sequence: Synthetic oligonucleotide
  Antisense strand to SEQ ID NO: 2580000
aagaaccuggccauauuuc

SEQ ID NO: 2580002 - RNA, 19 nt, Artificial Sequence
  Description of Artificial Sequence: Synthetic oligonucleotide
  Sense strand starting at position 209 of SEQ ID NO: 1889125
cugaaauguuugucaggua

SEQ ID NO: 2580003 - RNA, 19 nt, Artificial Sequence
  Description of Artificial Sequence: Synthetic oligonucleotide
  Antisense strand to SEQ ID NO: 2580002
uaccugacaaacauuucag

SEQ ID NO: 2580004 - RNA, 19 nt, Artificial Sequence
  Description of Artificial Sequence: Synthetic oligonucleotide
  Sense strand starting at position 315 of SEQ ID NO: 1889125
ccaagccacguuuagagau

SEQ ID NO: 2580005 - RNA, 19 nt, Artificial Sequence
  Description of Artificial Sequence: Synthetic oligonucleotide
  Antisense strand to SEQ ID NO: 2580004
aucucuaaacguggcuugg

SEQ ID NO: 2580006 - RNA, 19 nt, Artificial Sequence
  Description of Artificial Sequence: Synthetic oligonucleotide
  Sense strand starting at position 328 of SEQ ID NO: 1889125
agagauuucugucacagga

SEQ ID NO: 2580007 - RNA, 19 nt, Artificial Sequence
  Description of Artificial Sequence: Synthetic oligonucleotide
  Antisense strand to SEQ ID NO: 2580006
uccugugacagaaaucucu

SEQ ID NO: 2580008 - RNA, 19 nt, Artificial Sequence
  Description of Artificial Sequence: Synthetic oligonucleotide
  Sense strand starting at position 457 of SEQ ID NO: 1889125
ccuggaagccaauaauucu

SEQ ID NO: 2580009 - RNA, 19 nt, Artificial Sequence
  Description of Artificial Sequence: Synthetic oligonucleotide
  Antisense strand to SEQ ID NO: 2580008
agaauuauuggcuuccagg

SEQ ID NO: 2580010 - RNA, 19 nt, Artificial Sequence
  Description of Artificial Sequence: Synthetic oligonucleotide
  Sense strand starting at position 465 of SEQ ID NO: 1889125
ccaauaauucuguggugag

SEQ ID NO: 2580011 - RNA, 19 nt, Artificial Sequence
  Description of Artificial Sequence: Synthetic oligonucleotide
  Antisense strand to SEQ ID NO: 2580010
cucaccacagaauuauugg

SEQ ID NO: 2580012 - RNA, 19 nt, Artificial Sequence
  Description of Artificial Sequence: Synthetic oligonucleotide
  Sense strand starting at position 483 of SEQ ID NO: 1889125
gagguagccucauccaaca

SEQ ID NO: 2580013 - RNA, 19 nt, Artificial Sequence
  Description of Artificial Sequence: Synthetic oligonucleotide
  Antisense strand to SEQ ID NO: 2580012
uguuggaugaggcuaccuc

SEQ ID NO: 2580014 - RNA, 19 nt, Artificial Sequence
  Description of Artificial Sequence: Synthetic oligonucleotide
  Sense strand starting at position 596 of SEQ ID NO: 1889125
cugcuucuccuacagguau

SEQ ID NO: 2580015 - RNA, 19 nt, Artificial Sequence
  Description of Artificial Sequence: Synthetic oligonucleotide
  Antisense strand to SEQ ID NO: 2580014
auaccuguaggagaagcag

SEQ ID NO: 2580016 - RNA, 19 nt, Artificial Sequence
  Description of Artificial Sequence: Synthetic oligonucleotide
  Sense strand starting at position 692 of SEQ ID NO: 1889125
aucgaaacugccuagucau

SEQ ID NO: 2580017 - RNA, 19 nt, Artificial Sequence
  Description of Artificial Sequence: Synthetic oligonucleotide
  Antisense strand to SEQ ID NO: 2580016
augacuaggcaguuucgau

SEQ ID NO: 2580018 - RNA, 19 nt, Artificial Sequence
  Description of Artificial Sequence: Synthetic oligonucleotide
  Sense strand starting at position 747 of SEQ ID NO: 1889125
aauggauuacuuugagggu

SEQ ID NO: 2580019 - RNA, 19 nt, Artificial Sequence
  Description of Artificial Sequence: Synthetic oligonucleotide
  Antisense strand to SEQ ID NO: 2580018
acccucaaaguaauccauu

SEQ ID NO: 2580020 - RNA, 19 nt, Artificial Sequence
  Description of Artificial Sequence: Synthetic oligonucleotide
  Sense strand starting at position 751 of SEQ ID NO: 1889125
gauuacuuugagggucauc

SEQ ID NO: 2580021 - RNA, 19 nt, Artificial Sequence
  Description of Artificial Sequence: Synthetic oligonucleotide
  Antisense strand to SEQ ID NO: 2580020
gaugacccucaaaguaauc

SEQ ID NO: 2580022 - RNA, 19 nt, Artificial Sequence
  Description of Artificial Sequence: Synthetic oligonucleotide
  Sense strand starting at position 775 of SEQ ID NO: 1889125
ugaagugguaaaugguuaa

SEQ ID NO: 2580023 - RNA, 19 nt, Artificial Sequence
  Description of Artificial Sequence: Synthetic oligonucleotide
  Antisense strand to SEQ ID NO: 2580022
uuaaccauuuaccacuuca

SEQ ID NO: 2580024 - RNA, 19 nt, Artificial Sequence
  Description of Artificial Sequence: Synthetic oligonucleotide
  Sense strand starting at position 785 of SEQ ID NO: 1889125
aaugguuaacguggaagau

SEQ ID NO: 2580025 - RNA, 19 nt, Artificial Sequence
  Description of Artificial Sequence: Synthetic oligonucleotide
  Antisense strand to SEQ ID NO: 2580024
aucuuccacguuaaccauu

SEQ ID NO: 2580026 - RNA, 19 nt, Artificial Sequence
  Description of Artificial Sequence: Synthetic oligonucleotide
  Sense strand starting at position 823 of SEQ ID NO: 1889125
aacuuaggccgaugaggua

SEQ ID NO: 2580027 - RNA, 19 nt, Artificial Sequence
  Description of Artificial Sequence: Synthetic oligonucleotide
  Antisense strand to SEQ ID NO: 2580026
uaccucaucggccuaaguu

SEQ ID NO: 2580028 - RNA, 19 nt, Artificial Sequence
  Description of Artificial Sequence: Synthetic oligonucleotide
  Sense strand starting at position 921 of SEQ ID NO: 1889125
cugguaugauaguccucaa

SEQ ID NO: 2580029 - RNA, 19 nt, Artificial Sequence
  Description of Artificial Sequence: Synthetic oligonucleotide
  Antisense strand to SEQ ID NO: 2580028
uugaggacuaucauaccag

SEQ ID NO: 2580030 - RNA, 19 nt, Artificial Sequence
  Description of Artificial Sequence: Synthetic oligonucleotide
  Sense strand starting at position 924 of SEQ ID NO: 1889125
guaugauaguccucaaaua

SEQ ID NO: 2580031 - RNA, 19 nt, Artificial Sequence
  Description of Artificial Sequence: Synthetic oligonucleotide
  Antisense strand to SEQ ID NO: 2580030
uauuugaggacuaucauac

SEQ ID NO: 2580032 - RNA, 19 nt, Artificial Sequence
  Description of Artificial Sequence: Synthetic oligonucleotide
  Sense strand starting at position 1038 of SEQ ID NO: 1889125
uguguaauuaaggaaaugu

SEQ ID NO: 2580033 - RNA, 19 nt, Artificial Sequence
  Description of Artificial Sequence: Synthetic oligonucleotide
  Antisense strand to SEQ ID NO: 2580032
acauuuccuuaauuacaca

SEQ ID NO: 2580034 - RNA, 19 nt, Artificial Sequence
  Description of Artificial Sequence: Synthetic oligonucleotide
  Sense strand starting at position 1070 of SEQ ID NO: 1889125
gaagcacauucugugacau

SEQ ID NO: 2580035 - RNA, 19 nt, Artificial Sequence
  Description of Artificial Sequence: Synthetic oligonucleotide
  Antisense strand to SEQ ID NO: 2580034
augucacagaaugugcuuc

SEQ ID NO: 2580036 - RNA, 19 nt, Artificial Sequence
  Description of Artificial Sequence: Synthetic oligonucleotide
  Sense strand starting at position 1753 of SEQ ID NO: 1889125
gcaugcuguauguagaaau

SEQ ID NO: 2580037 - RNA, 19 nt, Artificial Sequence
  Description of Artificial Sequence: Synthetic oligonucleotide
  Antisense strand to SEQ ID NO: 2580036
auuucuacauacagcaugc

SEQ ID NO: 2580038 - RNA, 19 nt, Artificial Sequence
  Description of Artificial Sequence: Synthetic oligonucleotide
  Sense strand starting at position 2041 of SEQ ID NO: 1889125
ggcaaagaguuauugauug

SEQ ID NO: 2580039 - RNA, 19 nt, Artificial Sequence
  Description of Artificial Sequence: Synthetic oligonucleotide
  Antisense strand to SEQ ID NO: 2580038
caaucaauaacucuuugcc

SEQ ID NO: 2580040 - RNA, 19 nt, Artificial Sequence
  Description of Artificial Sequence: Synthetic oligonucleotide
  Sense strand starting at position 2045 of SEQ ID NO: 1889125
aagaguuauugauugugau

SEQ ID NO: 2580041 - RNA, 19 nt, Artificial Sequence
  Description of Artificial Sequence: Synthetic oligonucleotide
  Antisense strand to SEQ ID NO: 2580040
aucacaaucaauaacucuu

SEQ ID NO: 2580042 - RNA, 19 nt, Artificial Sequence
  Description of Artificial Sequence: Synthetic oligonucleotide
  Sense strand starting at position 2046 of SEQ ID NO: 1889125
agaguuauugauugugaug

SEQ ID NO: 2580043 - RNA, 19 nt, Artificial Sequence
  Description of Artificial Sequence: Synthetic oligonucleotide
  Antisense strand to SEQ ID NO: 2580042
caucacaaucaauaacucu

SEQ ID NO: 2580044 - RNA, 19 nt, Artificial Sequence
  Description of Artificial Sequence: Synthetic oligonucleotide
  Sense strand starting at position 2058 of SEQ ID NO: 1889125
ugugaugcaagccaaagau

SEQ ID NO: 2580045 - RNA, 19 nt, Artificial Sequence
  Description of Artificial Sequence: Synthetic oligonucleotide
  Antisense strand to SEQ ID NO: 2580044
aucuuuggcuugcaucaca

SEQ ID NO: 2580046 - RNA, 19 nt, Artificial Sequence
  Description of Artificial Sequence: Synthetic oligonucleotide
  Sense strand starting at position 2208 of SEQ ID NO: 1889125
gagaaaggcugccugugau

SEQ ID NO: 2580047 - RNA, 19 nt, Artificial Sequence
  Description of Artificial Sequence: Synthetic oligonucleotide
  Antisense strand to SEQ ID NO: 2580046
aucacaggcagccuuucuc

SEQ ID NO: 2580048 - RNA, 19 nt, Artificial Sequence
  Description of Artificial Sequence: Synthetic oligonucleotide
  Sense strand starting at position 2435 of SEQ ID NO: 1889125
gugucauggaaucauaagu

SEQ ID NO: 2580049 - RNA, 19 nt, Artificial Sequence
  Description of Artificial Sequence: Synthetic oligonucleotide
  Antisense strand to SEQ ID NO: 2580048
acuuaugauuccaugacac

SEQ ID NO: 2580050 - RNA, 19 nt, Artificial Sequence
  Description of Artificial Sequence: Synthetic oligonucleotide
  Sense strand starting at position 2466 of SEQ ID NO: 1889125
gugguugucagugaaauau

SEQ ID NO: 2580051 - RNA, 19 nt, Artificial Sequence
  Description of Artificial Sequence: Synthetic oligonucleotide
  Antisense strand to SEQ ID NO: 2580050
auauuucacugacaaccac

SEQ ID NO: 2580052 - RNA, 19 nt, Artificial Sequence
  Description of Artificial Sequence: Synthetic oligonucleotide
  Sense strand starting at position 2566 of SEQ ID NO: 1889125
gcaagucuaagauggauca

SEQ ID NO: 2580053 - RNA, 19 nt, Artificial Sequence
  Description of Artificial Sequence: Synthetic oligonucleotide
  Antisense strand to SEQ ID NO: 2580052
ugauccaucuuagacuugc

SEQ ID NO: 2580054 - RNA, 19 nt, Artificial Sequence
  Description of Artificial Sequence: Synthetic oligonucleotide
  Sense strand starting at position 2628 of SEQ ID NO: 1889125
guugacacauugucuuaga

SEQ ID NO: 2580055 - RNA, 19 nt, Artificial Sequence
  Description of Artificial Sequence: Synthetic oligonucleotide
  Antisense strand to SEQ ID NO: 2580054
ucuaagacaaugugucaac

SEQ ID NO: 2580056 - RNA, 19 nt, Artificial Sequence
  Description of Artificial Sequence: Synthetic oligonucleotide
  Sense strand starting at position 3155 of SEQ ID NO: 1889125
auuacagaugcccagucau

SEQ ID NO: 2580057 - RNA, 19 nt, Artificial Sequence
  Description of Artificial Sequence: Synthetic oligonucleotide
  Antisense strand to SEQ ID NO: 2580056
augacugggcaucuguaau

SEQ ID NO: 2580058 - RNA, 19 nt, Artificial Sequence
  Description of Artificial Sequence: Synthetic oligonucleotide
  Sense strand starting at position 3214 of SEQ ID NO: 1889125
gcgaauaugcaugacucca

SEQ ID NO: 2580059 - RNA, 19 nt, Artificial Sequence
  Description of Artificial Sequence: Synthetic oligonucleotide
  Antisense strand to SEQ ID NO: 2580058
uggagucaugcauauucgc

SEQ ID NO: 2580060 - RNA, 19 nt, Artificial Sequence
  Description of Artificial Sequence: Synthetic oligonucleotide
  Sense strand starting at position 3285 of SEQ ID NO: 1889125
guacucuguguccaagaau

SEQ ID NO: 2580061 - RNA, 19 nt, Artificial Sequence
  Description of Artificial Sequence: Synthetic oligonucleotide
  Antisense strand to SEQ ID NO: 2580060
auucuuggacacagaguac

SEQ ID NO: 2580062 - RNA, 19 nt, Artificial Sequence
  Description of Artificial Sequence: Synthetic oligonucleotide
  Sense strand starting at position 3288 of SEQ ID NO: 1889125
cucuguguccaagaauaaa

SEQ ID NO: 2580063 - RNA, 19 nt, Artificial Sequence
  Description of Artificial Sequence: Synthetic oligonucleotide
  Antisense strand to SEQ ID NO: 2580062
uuuauucuuggacacagag

SEQ ID NO: 2580064 - RNA, 19 nt, Artificial Sequence
  Description of Artificial Sequence: Synthetic oligonucleotide
  Sense strand starting at position 3317 of SEQ ID NO: 1889125
aauggaggauugucccauu

SEQ ID NO: 2580065 - RNA, 19 nt, Artificial Sequence
  Description of Artificial Sequence: Synthetic oligonucleotide
  Antisense strand to SEQ ID NO: 2580064
aaugggacaauccuccauu

SEQ ID NO: 2580066 - RNA, 19 nt, Artificial Sequence
  Description of Artificial Sequence: Synthetic oligonucleotide
  Sense strand starting at position 3518 of SEQ ID NO: 1889125
uuugcagugggacauaauu

SEQ ID NO: 2580067 - RNA, 19 nt, Artificial Sequence
  Description of Artificial Sequence: Synthetic oligonucleotide
  Antisense strand to SEQ ID NO: 2580066
aauuaugucccacugcaaa

SEQ ID NO: 2580068 - RNA, 19 nt, Artificial Sequence
  Description of Artificial Sequence: Synthetic oligonucleotide
  Sense strand starting at position 3607 of SEQ ID NO: 1889125
guuguaaucccauagacca

SEQ ID NO: 2580069 - RNA, 19 nt, Artificial Sequence
  Description of Artificial Sequence: Synthetic oligonucleotide
  Antisense strand to SEQ ID NO: 2580068
uggucuaugggauuacaac

SEQ ID NO: 2580070 - RNA, 19 nt, Artificial Sequence
  Description of Artificial Sequence: Synthetic oligonucleotide
  Sense strand starting at position 3694 of SEQ ID NO: 1889125
gccacauuccuuuaagaga

SEQ ID NO: 2580071 - RNA, 19 nt, Artificial Sequence
  Description of Artificial Sequence: Synthetic oligonucleotide
  Antisense strand to SEQ ID NO: 2580070
ucucuuaaaggaauguggc

SEQ ID NO: 2580072 - RNA, 19 nt, Artificial Sequence
  Description of Artificial Sequence: Synthetic oligonucleotide
  Sense strand starting at position 3872 of SEQ ID NO: 1889125
uagaaaucacaguguggca

SEQ ID NO: 2580073 - RNA, 19 nt, Artificial Sequence
  Description of Artificial Sequence: Synthetic oligonucleotide
  Antisense strand to SEQ ID NO: 2580072
ugccacacugugauuucua

SEQ ID NO: 2580074 - RNA, 19 nt, Artificial Sequence
  Description of Artificial Sequence: Synthetic oligonucleotide
  Sense strand starting at position 56 of SEQ ID NO: 1889129
cuacaauggcccugauuau

SEQ ID NO: 2580075 - RNA, 19 nt, Artificial Sequence
  Description of Artificial Sequence: Synthetic oligonucleotide
  Antisense strand to SEQ ID NO: 2580074
auaaucagggccauuguag

SEQ ID NO: 2580076 - RNA, 19 nt, Artificial Sequence
  Description of Artificial Sequence: Synthetic oligonucleotide
  Sense strand starting at position 150 of SEQ ID NO: 1889129
agaaauauggaaugcaugu

SEQ ID NO: 2580077 - RNA, 19 nt, Artificial Sequence
  Description of Artificial Sequence: Synthetic oligonucleotide
  Antisense strand to SEQ ID NO: 2580076
acaugcauuccauauuucu

SEQ ID NO: 2580078 - RNA, 19 nt, Artificial Sequence
  Description of Artificial Sequence: Synthetic oligonucleotide
  Sense strand starting at position 237 of SEQ ID NO: 1889129
ugcagaggucuccaugaaa

SEQ ID NO: 2580079 - RNA, 19 nt, Artificial Sequence
  Description of Artificial Sequence: Synthetic oligonucleotide
  Antisense strand to SEQ ID NO: 2580078
uuucauggagaccucugca

SEQ ID NO: 2580080 - RNA, 19 nt, Artificial Sequence
  Description of Artificial Sequence: Synthetic oligonucleotide
  Sense strand starting at position 315 of SEQ ID NO: 1889129
ugcuaaggauuugauggau

SEQ ID NO: 2580081 - RNA, 19 nt, Artificial Sequence
  Description of Artificial Sequence: Synthetic oligonucleotide
  Antisense strand to SEQ ID NO: 2580080
auccaucaaauccuuagca

SEQ ID NO: 2580082 - RNA, 19 nt, Artificial Sequence
  Description of Artificial Sequence: Synthetic oligonucleotide
  Sense strand starting at position 328 of SEQ ID NO: 1889129
auggauuacugcuaacauc

SEQ ID NO: 2580083 - RNA, 19 nt, Artificial Sequence
  Description of Artificial Sequence: Synthetic oligonucleotide
  Antisense strand to SEQ ID NO: 2580082
gauguuagcaguaauccau

SEQ ID NO: 2580084 - RNA, 19 nt, Artificial Sequence
  Description of Artificial Sequence: Synthetic oligonucleotide
  Sense strand starting at position 413 of SEQ ID NO: 1889129
agauuucuuugagaucuga

SEQ ID NO: 2580085 - RNA, 19 nt, Artificial Sequence
  Description of Artificial Sequence: Synthetic oligonucleotide
  Antisense strand to SEQ ID NO: 2580084
ucagaucucaaagaaaucu

SEQ ID NO: 2580086 - RNA, 19 nt, Artificial Sequence
  Description of Artificial Sequence: Synthetic oligonucleotide
  Sense strand starting at position 443 of SEQ ID NO: 1889129
ucugccauccucuaggaaa

SEQ ID NO: 2580087 - RNA, 19 nt, Artificial Sequence
  Description of Artificial Sequence: Synthetic oligonucleotide
  Antisense strand to SEQ ID NO: 2580086
uuuccuagaggauggcaga

SEQ ID NO: 2580088 - RNA, 19 nt, Artificial Sequence
  Description of Artificial Sequence: Synthetic oligonucleotide
  Sense strand starting at position 463 of SEQ ID NO: 1889129
ggcucagugcguucauuga

SEQ ID NO: 2580089 - RNA, 19 nt, Artificial Sequence
  Description of Artificial Sequence: Synthetic oligonucleotide
  Antisense strand to SEQ ID NO: 2580088
ucaaugaacgcacugagcc

SEQ ID NO: 2580090 - RNA, 19 nt, Artificial Sequence
  Description of Artificial Sequence: Synthetic oligonucleotide
  Sense strand starting at position 520 of SEQ ID NO: 1889129
ucaucaaagucagguguuu

SEQ ID NO: 2580091 - RNA, 19 nt, Artificial Sequence
  Description of Artificial Sequence: Synthetic oligonucleotide
  Antisense strand to SEQ ID NO: 2580090
aaacaccugacuuugauga

SEQ ID NO: 2580092 - RNA, 19 nt, Artificial Sequence
  Description of Artificial Sequence: Synthetic oligonucleotide
  Sense strand starting at position 554 of SEQ ID NO: 1889129
aauuucuaguuggagaaga

SEQ ID NO: 2580093 - RNA, 19 nt, Artificial Sequence
  Description of Artificial Sequence: Synthetic oligonucleotide
  Antisense strand to SEQ ID NO: 2580092
ucuucuccaacuagaaauu

SEQ ID NO: 2580094 - RNA, 19 nt, Artificial Sequence
  Description of Artificial Sequence: Synthetic oligonucleotide
  Sense strand starting at position 605 of SEQ ID NO: 1889129
cuucuauguugcccgcaga

SEQ ID NO: 2580095 - RNA, 19 nt, Artificial Sequence
  Description of Artificial Sequence: Synthetic oligonucleotide
  Antisense strand to SEQ ID NO: 2580094
ucugcgggcaacauagaag

SEQ ID NO: 2580096 - RNA, 19 nt, Artificial Sequence
  Description of Artificial Sequence: Synthetic oligonucleotide
  Sense strand starting at position 606 of SEQ ID NO: 1889129
uucuauguugcccgcagaa

SEQ ID NO: 2580097 - RNA, 19 nt, Artificial Sequence
  Description of Artificial Sequence: Synthetic oligonucleotide
  Antisense strand to SEQ ID NO: 2580096
uucugcgggcaacauagaa

SEQ ID NO: 2580098 - RNA, 19 nt, Artificial Sequence
  Description of Artificial Sequence: Synthetic oligonucleotide
  Sense strand starting at position 732 of SEQ ID NO: 1889129
aggagcgacugauucugaa

SEQ ID NO: 2580099 - RNA, 19 nt, Artificial Sequence
  Description of Artificial Sequence: Synthetic oligonucleotide
  Antisense strand to SEQ ID NO: 2580098
uucagaaucagucgcuccu

SEQ ID NO: 2580100 - RNA, 19 nt, Artificial Sequence
  Description of Artificial Sequence: Synthetic oligonucleotide
  Sense strand starting at position 735 of SEQ ID NO: 1889129
agcgacugauucugaaaug

SEQ ID NO: 2580101 - RNA, 19 nt, Artificial Sequence
  Description of Artificial Sequence: Synthetic oligonucleotide
  Antisense strand to SEQ ID NO: 2580100
cauuucagaaucagucgcu

SEQ ID NO: 2580102 - RNA, 19 nt, Artificial Sequence
  Description of Artificial Sequence: Synthetic oligonucleotide
  Sense strand starting at position 839 of SEQ ID NO: 1889129
aaagcauaagauuggagua

SEQ ID NO: 2580103 - RNA, 19 nt, Artificial Sequence
  Description of Artificial Sequence: Synthetic oligonucleotide
  Antisense strand to SEQ ID NO: 2580102
uacuccaaucuuaugcuuu

SEQ ID NO: 2580104 - RNA, 19 nt, Artificial Sequence
  Description of Artificial Sequence: Synthetic oligonucleotide
  Sense strand starting at position 982 of SEQ ID NO: 1889129
gacgucaccugcuuaguuu

SEQ ID NO: 2580105 - RNA, 19 nt, Artificial Sequence
  Description of Artificial Sequence: Synthetic oligonucleotide
  Antisense strand to SEQ ID NO: 2580104
aaacuaagcaggugacguc

SEQ ID NO: 2580106 - RNA, 19 nt, Artificial Sequence
  Description of Artificial Sequence: Synthetic oligonucleotide
  Sense strand starting at position 1030 of SEQ ID NO: 1889129
uuucuuaauuuggguccaa

SEQ ID NO: 2580107 - RNA, 19 nt, Artificial Sequence
  Description of Artificial Sequence: Synthetic oligonucleotide
  Antisense strand to SEQ ID NO: 2580106
uuggacccaaauuaagaaa

SEQ ID NO: 2580108 - RNA, 19 nt, Artificial Sequence
  Description of Artificial Sequence: Synthetic oligonucleotide
  Sense strand starting at position 1039 of SEQ ID NO: 1889129
uuggguccaaaugguaaau

SEQ ID NO: 2580109 - RNA, 19 nt, Artificial Sequence
  Description of Artificial Sequence: Synthetic oligonucleotide
  Antisense strand to SEQ ID NO: 2580108
auuuaccauuuggacccaa

SEQ ID NO: 2580110 - RNA, 19 nt, Artificial Sequence
  Description of Artificial Sequence: Synthetic oligonucleotide
  Sense strand starting at position 1041 of SEQ ID NO: 1889129
ggguccaaaugguaaaucu

SEQ ID NO: 2580111 - RNA, 19 nt, Artificial Sequence
  Description of Artificial Sequence: Synthetic oligonucleotide
  Antisense strand to SEQ ID NO: 2580110
agauuuaccauuuggaccc

SEQ ID NO: 2580112 - RNA, 19 nt, Artificial Sequence
  Description of Artificial Sequence: Synthetic oligonucleotide
  Sense strand starting at position 1100 of SEQ ID NO: 1889129
ugggcugaauucgugacuu

SEQ ID NO: 2580113 - RNA, 19 nt, Artificial Sequence
  Description of Artificial Sequence: Synthetic oligonucleotide
  Antisense strand to SEQ ID NO: 2580112
aagucacgaauucagccca

SEQ ID NO: 2580114 - RNA, 19 nt, Artificial Sequence
  Description of Artificial Sequence: Synthetic oligonucleotide
  Sense strand starting at position 1275 of SEQ ID NO: 1889129
ugcgguaagguguggaaga

SEQ ID NO: 2580115 - RNA, 19 nt, Artificial Sequence
  Description of Artificial Sequence: Synthetic oligonucleotide
  Antisense strand to SEQ ID NO: 2580114
ucuuccacaccuuaccgca

SEQ ID NO: 2580116 - RNA, 19 nt, Artificial Sequence
  Description of Artificial Sequence: Synthetic oligonucleotide
  Sense strand starting at position 1276 of SEQ ID NO: 1889129
gcgguaagguguggaagaa

SEQ ID NO: 2580117 - RNA, 19 nt, Artificial Sequence
  Description of Artificial Sequence: Synthetic oligonucleotide
  Antisense strand to SEQ ID NO: 2580116
uucuuccacaccuuaccgc

SEQ ID NO: 2580118 - RNA, 19 nt, Artificial Sequence
  Description of Artificial Sequence: Synthetic oligonucleotide
  Sense strand starting at position 1358 of SEQ ID NO: 1889129
ggguaugaugcguaggaca

SEQ ID NO: 2580119 - RNA, 19 nt, Artificial Sequence
  Description of Artificial Sequence: Synthetic oligonucleotide
  Antisense strand to SEQ ID NO: 2580118
uguccuacgcaucauaccc

SEQ ID NO: 2580120 - RNA, 19 nt, Artificial Sequence
  Description of Artificial Sequence: Synthetic oligonucleotide
  Sense strand starting at position 1360 of SEQ ID NO: 1889129
guaugaugcguaggacauc

SEQ ID NO: 2580121 - RNA, 19 nt, Artificial Sequence
  Description of Artificial Sequence: Synthetic oligonucleotide
  Antisense strand to SEQ ID NO: 2580120
gauguccuacgcaucauac

SEQ ID NO: 2580122 - RNA, 19 nt, Artificial Sequence
  Description of Artificial Sequence: Synthetic oligonucleotide
  Sense strand starting at position 2041 of SEQ ID NO: 1889129
gacugugcucuuggcugau

SEQ ID NO: 2580123 - RNA, 19 nt, Artificial Sequence
  Description of Artificial Sequence: Synthetic oligonucleotide
  Antisense strand to SEQ ID NO: 2580122
aucagccaagagcacaguc

SEQ ID NO: 2580124 - RNA, 19 nt, Artificial Sequence
  Description of Artificial Sequence: Synthetic oligonucleotide
  Sense strand starting at position 2169 of SEQ ID NO: 1889129
agcagagagccuugagaug

SEQ ID NO: 2580125 - RNA, 19 nt, Artificial Sequence
  Description of Artificial Sequence: Synthetic oligonucleotide
  Antisense strand to SEQ ID NO: 2580124
caucucaaggcucucugcu

SEQ ID NO: 2580126 - RNA, 19 nt, Artificial Sequence
  Description of Artificial Sequence: Synthetic oligonucleotide
  Sense strand starting at position 2314 of SEQ ID NO: 1889129
gcuuaacacuccuccgaac

SEQ ID NO: 2580127 - RNA, 19 nt, Artificial Sequence
  Description of Artificial Sequence: Synthetic oligonucleotide
  Antisense strand to SEQ ID NO: 2580126
guucggaggaguguuaagc

SEQ ID NO: 2580128 - RNA, 19 nt, Artificial Sequence
  Description of Artificial Sequence: Synthetic oligonucleotide
  Sense strand starting at position 2530 of SEQ ID NO: 1889129
cucaaaggcuuccgaagaa

SEQ ID NO: 2580129 - RNA, 19 nt, Artificial Sequence
  Description of Artificial Sequence: Synthetic oligonucleotide
  Antisense strand to SEQ ID NO: 2580128
uucuucggaagccuuugag

SEQ ID NO: 2580130 - RNA, 19 nt, Artificial Sequence
  Description of Artificial Sequence: Synthetic oligonucleotide
  Sense strand starting at position 3191 of SEQ ID NO: 1889129
ccgccacagucuuccuuua

SEQ ID NO: 2580131 - RNA, 19 nt, Artificial Sequence
  Description of Artificial Sequence: Synthetic oligonucleotide
  Antisense strand to SEQ ID NO: 2580130
uaaaggaagacuguggcgg

SEQ ID NO: 2580132 - RNA, 19 nt, Artificial Sequence
  Description of Artificial Sequence: Synthetic oligonucleotide
  Sense strand starting at position 3300 of SEQ ID NO: 1889129
caacauugguggucugcau

SEQ ID NO: 2580133 - RNA, 19 nt, Artificial Sequence
  Description of Artificial Sequence: Synthetic oligonucleotide
  Antisense strand to SEQ ID NO: 2580132
augcagaccaccaauguug

SEQ ID NO: 2580134 - RNA, 19 nt, Artificial Sequence
  Description of Artificial Sequence: Synthetic oligonucleotide
  Sense strand starting at position 3341 of SEQ ID NO: 1889129
aaccaaauguuccugugga

SEQ ID NO: 2580135 - RNA, 19 nt, Artificial Sequence
  Description of Artificial Sequence: Synthetic oligonucleotide
  Antisense strand to SEQ ID NO: 2580134
uccacaggaacauuugguu

SEQ ID NO: 2580136 - RNA, 19 nt, Artificial Sequence
  Description of Artificial Sequence: Synthetic oligonucleotide
  Sense strand starting at position 3342 of SEQ ID NO: 1889129
accaaauguuccuguggag

SEQ ID NO: 2580137 - RNA, 19 nt, Artificial Sequence
  Description of Artificial Sequence: Synthetic oligonucleotide
  Antisense strand to SEQ ID NO: 2580136
cuccacaggaacauuuggu

SEQ ID NO: 2580138 - RNA, 19 nt, Artificial Sequence
  Description of Artificial Sequence: Synthetic oligonucleotide
  Sense strand starting at position 3345 of SEQ ID NO: 1889129
aaauguuccuguggagaga

SEQ ID NO: 2580139 - RNA, 19 nt, Artificial Sequence
  Description of Artificial Sequence: Synthetic oligonucleotide
  Antisense strand to SEQ ID NO: 2580138
ucucuccacaggaacauuu

SEQ ID NO: 2580140 - RNA, 19 nt, Artificial Sequence
  Description of Artificial Sequence: Synthetic oligonucleotide
  Sense strand starting at position 3346 of SEQ ID NO: 1889129
aauguuccuguggagagau

SEQ ID NO: 2580141 - RNA, 19 nt, Artificial Sequence
  Description of Artificial Sequence: Synthetic oligonucleotide
  Antisense strand to SEQ ID NO: 2580140
aucucuccacaggaacauu

SEQ ID NO: 2580142 - RNA, 19 nt, Artificial Sequence
  Description of Artificial Sequence: Synthetic oligonucleotide
  Sense strand starting at position 3509 of SEQ ID NO: 1889129
gcucaaauaucgccaguga

SEQ ID NO: 2580143 - RNA, 19 nt, Artificial Sequence
  Description of Artificial Sequence: Synthetic oligonucleotide
  Antisense strand to SEQ ID NO: 2580142
ucacuggcgauauuugagc

SEQ ID NO: 2580144 - RNA, 19 nt, Artificial Sequence
  Description of Artificial Sequence: Synthetic oligonucleotide
  Sense strand starting at position 3592 of SEQ ID NO: 1889129
ggauaauaauaugcgaaag

SEQ ID NO: 2580145 - RNA, 19 nt, Artificial Sequence
  Description of Artificial Sequence: Synthetic oligonucleotide
  Antisense strand to SEQ ID NO: 2580144
cuuucgcauauuauuaucc

SEQ ID NO: 2580146 - RNA, 19 nt, Artificial Sequence
  Description of Artificial Sequence: Synthetic oligonucleotide
  Sense strand starting at position 3594 of SEQ ID NO: 1889129
auaauaauaugcgaaagac

SEQ ID NO: 2580147 - RNA, 19 nt, Artificial Sequence
  Description of Artificial Sequence: Synthetic oligonucleotide
  Antisense strand to SEQ ID NO: 2580146
gucuuucgcauauuauuau

SEQ ID NO: 2580148 - RNA, 19 nt, Artificial Sequence
  Description of Artificial Sequence: Synthetic oligonucleotide
  Sense strand starting at position 3602 of SEQ ID NO: 1889129
augcgaaagacacgucuua

SEQ ID NO: 2580149 - RNA, 19 nt, Artificial Sequence
  Description of Artificial Sequence: Synthetic oligonucleotide
  Antisense strand to SEQ ID NO: 2580148
uaagacgugucuuucgcau

SEQ ID NO: 2580150 - RNA, 19 nt, Artificial Sequence
  Description of Artificial Sequence: Synthetic oligonucleotide
  Sense strand starting at position 3630 of SEQ ID NO: 1889129
cuaccuuagcuguggaaga

SEQ ID NO: 2580151 - RNA, 19 nt, Artificial Sequence
  Description of Artificial Sequence: Synthetic oligonucleotide
  Antisense strand to SEQ ID NO: 2580150
ucuuccacagcuaagguag

SEQ ID NO: 2580152 - RNA, 19 nt, Artificial Sequence
  Description of Artificial Sequence: Synthetic oligonucleotide
  Sense strand starting at position 31 of SEQ ID NO: 1889128
ugggcugaauucgugacuu

SEQ ID NO: 2580153 - RNA, 19 nt, Artificial Sequence
  Description of Artificial Sequence: Synthetic oligonucleotide
  Antisense strand to SEQ ID NO: 2580152
aagucacgaauucagccca

SEQ ID NO: 2580154 - RNA, 19 nt, Artificial Sequence
  Description of Artificial Sequence: Synthetic oligonucleotide
  Sense strand starting at position 206 of SEQ ID NO: 1889128
ugcgguaagguguggaaga

SEQ ID NO: 2580155 - RNA, 19 nt, Artificial Sequence
  Description of Artificial Sequence: Synthetic oligonucleotide
  Antisense strand to SEQ ID NO: 2580154
ucuuccacaccuuaccgca

SEQ ID NO: 2580156 - RNA, 19 nt, Artificial Sequence
  Description of Artificial Sequence: Synthetic oligonucleotide
  Sense strand starting at position 289 of SEQ ID NO: 1889128
ggguaugaugcguaggaca

SEQ ID NO: 2580157 - RNA, 19 nt, Artificial Sequence
  Description of Artificial Sequence: Synthetic oligonucleotide
  Antisense strand to SEQ ID NO: 2580156
uguccuacgcaucauaccc

SEQ ID NO: 2580158 - RNA, 19 nt, Artificial Sequence
  Description of Artificial Sequence: Synthetic oligonucleotide
  Sense strand starting at position 291 of SEQ ID NO: 1889128
guaugaugcguaggacauc

SEQ ID NO: 2580159 - RNA, 19 nt, Artificial Sequence
  Description of Artificial Sequence: Synthetic oligonucleotide
  Antisense strand to SEQ ID NO: 2580158
gauguccuacgcaucauac

SEQ ID NO: 2580160 - RNA, 19 nt, Artificial Sequence
  Description of Artificial Sequence: Synthetic oligonucleotide
  Sense strand starting at position 1100 of SEQ ID NO: 1889128
agcagagagccuugagaug

SEQ ID NO: 2580161 - RNA, 19 nt, Artificial Sequence
  Description of Artificial Sequence: Synthetic oligonucleotide
  Antisense strand to SEQ ID NO: 2580160
caucucaaggcucucugcu

SEQ ID NO: 2580162 - RNA, 19 nt, Artificial Sequence
  Description of Artificial Sequence: Synthetic oligonucleotide
  Sense strand starting at position 1245 of SEQ ID NO: 1889128
gcuuaacacuccuccgaac

SEQ ID NO: 2580163 - RNA, 19 nt, Artificial Sequence
  Description of Artificial Sequence: Synthetic oligonucleotide
  Antisense strand to SEQ ID NO: 2580162
guucggaggaguguuaagc

SEQ ID NO: 2580164 - RNA, 19 nt, Artificial Sequence
  Description of Artificial Sequence: Synthetic oligonucleotide
  Sense strand starting at position 2231 of SEQ ID NO: 1889128
caacauugguggucugcau

SEQ ID NO: 2580165 - RNA, 19 nt, Artificial Sequence
  Description of Artificial Sequence: Synthetic oligonucleotide
  Antisense strand to SEQ ID NO: 2580164
augcagaccaccaauguug

SEQ ID NO: 2580166 - RNA, 19 nt, Artificial Sequence
  Description of Artificial Sequence: Synthetic oligonucleotide
  Sense strand starting at position 2272 of SEQ ID NO: 1889128
aaccaaauguuccugugga

SEQ ID NO: 2580167 - RNA, 19 nt, Artificial Sequence
  Description of Artificial Sequence: Synthetic oligonucleotide
  Antisense strand to SEQ ID NO: 2580166
uccacaggaacauuugguu

SEQ ID NO: 2580168 - RNA, 19 nt, Artificial Sequence
  Description of Artificial Sequence: Synthetic oligonucleotide
  Sense strand starting at position 2277 of SEQ ID NO: 1889128
aauguuccuguggagagau

SEQ ID NO: 2580169 - RNA, 19 nt, Artificial Sequence
  Description of Artificial Sequence: Synthetic oligonucleotide
  Antisense strand to SEQ ID NO: 2580168
aucucuccacaggaacauu

SEQ ID NO: 2580170 - RNA, 19 nt, Artificial Sequence
  Description of Artificial Sequence: Synthetic oligonucleotide
  Sense strand starting at position 2523 of SEQ ID NO: 1889128
ggauaauaauaugcgaaag

SEQ ID NO: 2580171 - RNA, 19 nt, Artificial Sequence
  Description of Artificial Sequence: Synthetic oligonucleotide
  Antisense strand to SEQ ID NO: 2580170
cuuucgcauauuauuaucc

SEQ ID NO: 2580172 - RNA, 19 nt, Artificial Sequence
  Description of Artificial Sequence: Synthetic oligonucleotide
  Sense strand starting at position 2533 of SEQ ID NO: 1889128
augcgaaagacacgucuua

SEQ ID NO: 2580173 - RNA, 19 nt, Artificial Sequence
  Description of Artificial Sequence: Synthetic oligonucleotide
  Antisense strand to SEQ ID NO: 2580172
uaagacgugucuuucgcau

SEQ ID NO: 2580174 - RNA, 19 nt, Artificial Sequence
  Description of Artificial Sequence: Synthetic oligonucleotide
  Sense strand starting at position 2561 of SEQ ID NO: 1889128
cuaccuuagcuguggaaga

SEQ ID NO: 2580175 - RNA, 19 nt, Artificial Sequence
  Description of Artificial Sequence: Synthetic oligonucleotide
  Antisense strand to SEQ ID NO: 2580174
ucuuccacagcuaagguag

SEQ ID NO: 2580176 - RNA, 19 nt, Artificial Sequence
  Description of Artificial Sequence: Synthetic oligonucleotide
  Sense strand starting at position 2984 of SEQ ID NO: 1889128
gccaauagaucuccagagu

SEQ ID NO: 2580177 - RNA, 19 nt, Artificial Sequence
  Description of Artificial Sequence: Synthetic oligonucleotide
  Antisense strand to SEQ ID NO: 2580176
acucuggagaucuauuggc

SEQ ID NO: 2580178 - RNA, 19 nt, Artificial Sequence
  Description of Artificial Sequence: Synthetic oligonucleotide
  Sense strand starting at position 2987 of SEQ ID NO: 1889128
aauagaucuccagagucgu

SEQ ID NO: 2580179 - RNA, 19 nt, Artificial Sequence
  Description of Artificial Sequence: Synthetic oligonucleotide
  Antisense strand to SEQ ID NO: 2580178
acgacucuggagaucuauu

SEQ ID NO: 2580180 - RNA, 19 nt, Artificial Sequence
  Description of Artificial Sequence: Synthetic oligonucleotide
  Sense strand starting at position 2993 of SEQ ID NO: 1889128
ucuccagagucgucccaau

SEQ ID NO: 2580181 - RNA, 19 nt, Artificial Sequence
  Description of Artificial Sequence: Synthetic oligonucleotide
  Antisense strand to SEQ ID NO: 2580180
auugggacgacucuggaga

SEQ ID NO: 2580182 - RNA, 19 nt, Artificial Sequence
  Description of Artificial Sequence: Synthetic oligonucleotide
  Sense strand starting at position 3086 of SEQ ID NO: 1889128
gagagauccugggaacccu

SEQ ID NO: 2580183 - RNA, 19 nt, Artificial Sequence
  Description of Artificial Sequence: Synthetic oligonucleotide
  Antisense strand to SEQ ID NO: 2580182
aggguucccaggaucucuc

SEQ ID NO: 2580184 - RNA, 19 nt, Artificial Sequence
  Description of Artificial Sequence: Synthetic oligonucleotide
  Sense strand starting at position 3198 of SEQ ID NO: 1889128
gucguauaugcagacaucu

SEQ ID NO: 2580185 - RNA, 19 nt, Artificial Sequence
  Description of Artificial Sequence: Synthetic oligonucleotide
  Antisense strand to SEQ ID NO: 2580184
agaugucugcauauacgac

SEQ ID NO: 2580186 - RNA, 19 nt, Artificial Sequence
  Description of Artificial Sequence: Synthetic oligonucleotide
  Sense strand starting at position 3206 of SEQ ID NO: 1889128
ugcagacaucuuuaacugu

SEQ ID NO: 2580187 - RNA, 19 nt, Artificial Sequence
  Description of Artificial Sequence: Synthetic oligonucleotide
  Antisense strand to SEQ ID NO: 2580186
acaguuaaagaugucugca

SEQ ID NO: 2580188 - RNA, 19 nt, Artificial Sequence
  Description of Artificial Sequence: Synthetic oligonucleotide
  Sense strand starting at position 3213 of SEQ ID NO: 1889128
aucuuuaacuguuuaaggu

SEQ ID NO: 2580189 - RNA, 19 nt, Artificial Sequence
  Description of Artificial Sequence: Synthetic oligonucleotide
  Antisense strand to SEQ ID NO: 2580188
accuuaaacaguuaaagau

SEQ ID NO: 2580190 - RNA, 19 nt, Artificial Sequence
  Description of Artificial Sequence: Synthetic oligonucleotide
  Sense strand starting at position 3264 of SEQ ID NO: 1889128
uugugagucaauugggaag

SEQ ID NO: 2580191 - RNA, 19 nt, Artificial Sequence
  Description of Artificial Sequence: Synthetic oligonucleotide
  Antisense strand to SEQ ID NO: 2580190
cuucccaauugacucacaa

SEQ ID NO: 2580192 - RNA, 19 nt, Artificial Sequence
  Description of Artificial Sequence: Synthetic oligonucleotide
  Sense strand starting at position 3321 of SEQ ID NO: 1889128
ggaauacagcucuguaaag

SEQ ID NO: 2580193 - RNA, 19 nt, Artificial Sequence
  Description of Artificial Sequence: Synthetic oligonucleotide
  Antisense strand to SEQ ID NO: 2580192
cuuuacagagcuguauucc

SEQ ID NO: 2580194 - RNA, 19 nt, Artificial Sequence
  Description of Artificial Sequence: Synthetic oligonucleotide
  Sense strand starting at position 3322 of SEQ ID NO: 1889128
gaauacagcucuguaaagu

SEQ ID NO: 2580195 - RNA, 19 nt, Artificial Sequence
  Description of Artificial Sequence: Synthetic oligonucleotide
  Antisense strand to SEQ ID NO: 2580194
acuuuacagagcuguauuc

SEQ ID NO: 2580196 - RNA, 19 nt, Artificial Sequence
  Description of Artificial Sequence: Synthetic oligonucleotide
  Sense strand starting at position 3358 of SEQ ID NO: 1889128
cgagguuaugguugaaaga

SEQ ID NO: 2580197 - RNA, 19 nt, Artificial Sequence
  Description of Artificial Sequence: Synthetic oligonucleotide
  Antisense strand to SEQ ID NO: 2580196
ucuuucaaccauaaccucg

SEQ ID NO: 2580198 - RNA, 19 nt, Artificial Sequence
  Description of Artificial Sequence: Synthetic oligonucleotide
  Sense strand starting at position 3361 of SEQ ID NO: 1889128
gguuaugguugaaagagga

SEQ ID NO: 2580199 - RNA, 19 nt, Artificial Sequence
  Description of Artificial Sequence: Synthetic oligonucleotide
  Antisense strand to SEQ ID NO: 2580198
uccucuuucaaccauaacc

SEQ ID NO: 2580200 - RNA, 19 nt, Artificial Sequence
  Description of Artificial Sequence: Synthetic oligonucleotide
  Sense strand starting at position 3455 of SEQ ID NO: 1889128
agaggcaguuguuucuaaa

SEQ ID NO: 2580201 - RNA, 19 nt, Artificial Sequence
  Description of Artificial Sequence: Synthetic oligonucleotide
  Antisense strand to SEQ ID NO: 2580200
uuuagaaacaacugccucu

SEQ ID NO: 2580202 - RNA, 19 nt, Artificial Sequence
  Description of Artificial Sequence: Synthetic oligonucleotide
  Sense strand starting at position 3490 of SEQ ID NO: 1889128
gguccaggagguuaucuuu

SEQ ID NO: 2580203 - RNA, 19 nt, Artificial Sequence
  Description of Artificial Sequence: Synthetic oligonucleotide
  Antisense strand to SEQ ID NO: 2580202
aaagauaaccuccuggacc

SEQ ID NO: 2580204 - RNA, 19 nt, Artificial Sequence
  Description of Artificial Sequence: Synthetic oligonucleotide
  Sense strand starting at position 3498 of SEQ ID NO: 1889128
agguuaucuuucccaggga

SEQ ID NO: 2580205 - RNA, 19 nt, Artificial Sequence
  Description of Artificial Sequence: Synthetic oligonucleotide
  Antisense strand to SEQ ID NO: 2580204
ucccugggaaagauaaccu

SEQ ID NO: 2580206 - RNA, 19 nt, Artificial Sequence
  Description of Artificial Sequence: Synthetic oligonucleotide
  Sense strand starting at position 3501 of SEQ ID NO: 1889128
uuaucuuucccagggaguu

SEQ ID NO: 2580207 - RNA, 19 nt, Artificial Sequence
  Description of Artificial Sequence: Synthetic oligonucleotide
  Antisense strand to SEQ ID NO: 2580206
aacucccugggaaagauaa

SEQ ID NO: 2580208 - RNA, 19 nt, Artificial Sequence
  Description of Artificial Sequence: Synthetic oligonucleotide
  Sense strand starting at position 3502 of SEQ ID NO: 1889128
uaucuuucccagggaguuu

SEQ ID NO: 2580209 - RNA, 19 nt, Artificial Sequence
  Description of Artificial Sequence: Synthetic oligonucleotide
  Antisense strand to SEQ ID NO: 2580208
aaacucccugggaaagaua

SEQ ID NO: 2580210 - RNA, 19 nt, Artificial Sequence
  Description of Artificial Sequence: Synthetic oligonucleotide
  Sense strand starting at position 3573 of SEQ ID NO: 1889128
uggagaaaguuggcuugaa

SEQ ID NO: 2580211 - RNA, 19 nt, Artificial Sequence
  Description of Artificial Sequence: Synthetic oligonucleotide
  Antisense strand to SEQ ID NO: 2580210
uucaagccaacuuucucca

SEQ ID NO: 2580212 - RNA, 19 nt, Artificial Sequence
  Description of Artificial Sequence: Synthetic oligonucleotide
  Sense strand starting at position 3574 of SEQ ID NO: 1889128
ggagaaaguuggcuugaaa

SEQ ID NO: 2580213 - RNA, 19 nt, Artificial Sequence
  Description of Artificial Sequence: Synthetic oligonucleotide
  Antisense strand to SEQ ID NO: 2580212
uuucaagccaacuuucucc

SEQ ID NO: 2580214 - RNA, 19 nt, Artificial Sequence
  Description of Artificial Sequence: Synthetic oligonucleotide
  Sense strand starting at position 3588 of SEQ ID NO: 1889128
ugaaauugacaaugcuuaa

SEQ ID NO: 2580215 - RNA, 19 nt, Artificial Sequence
  Description of Artificial Sequence: Synthetic oligonucleotide
  Antisense strand to SEQ ID NO: 2580214
uuaagcauugucaauuuca

SEQ ID NO: 2580216 - RNA, 19 nt, Artificial Sequence
  Description of Artificial Sequence: Synthetic oligonucleotide
  Sense strand starting at position 3592 of SEQ ID NO: 1889128
auugacaaugcuuaaaguu

SEQ ID NO: 2580217 - RNA, 19 nt, Artificial Sequence
  Description of Artificial Sequence: Synthetic oligonucleotide
  Antisense strand to SEQ ID NO: 2580216
aacuuuaagcauugucaau

SEQ ID NO: 2580218 - RNA, 19 nt, Artificial Sequence
  Description of Artificial Sequence: Synthetic oligonucleotide
  Sense strand starting at position 3600 of SEQ ID NO: 1889128
ugcuuaaaguucccaguau

SEQ ID NO: 2580219 - RNA, 19 nt, Artificial Sequence
  Description of Artificial Sequence: Synthetic oligonucleotide
  Antisense strand to SEQ ID NO: 2580218
auacugggaacuuuaagca

SEQ ID NO: 2580220 - RNA, 19 nt, Artificial Sequence
  Description of Artificial Sequence: Synthetic oligonucleotide
  Sense strand starting at position 3631 of SEQ ID NO: 1889128
ucaagaaaguuggauuuaa

SEQ ID NO: 2580221 - RNA, 19 nt, Artificial Sequence
  Description of Artificial Sequence: Synthetic oligonucleotide
  Antisense strand to SEQ ID NO: 2580220
uuaaauccaacuuucuuga

SEQ ID NO: 2580222 - RNA, 19 nt, Artificial Sequence
  Description of Artificial Sequence: Synthetic oligonucleotide
  Sense strand starting at position 3667 of SEQ ID NO: 1889128
cagaguacaucauagaaug

SEQ ID NO: 2580223 - RNA, 19 nt, Artificial Sequence
  Description of Artificial Sequence: Synthetic oligonucleotide
  Antisense strand to SEQ ID NO: 2580222
cauucuaugauguacucug

SEQ ID NO: 2580224 - RNA, 19 nt, Artificial Sequence
  Description of Artificial Sequence: Synthetic oligonucleotide
  Sense strand starting at position 3710 of SEQ ID NO: 1889128
aaaugagauugcuuggguu

SEQ ID NO: 2580225 - RNA, 19 nt, Artificial Sequence
  Description of Artificial Sequence: Synthetic oligonucleotide
  Antisense strand to SEQ ID NO: 2580224
aacccaagcaaucucauuu

SEQ ID NO: 2580226 - RNA, 19 nt, Artificial Sequence
  Description of Artificial Sequence: Synthetic oligonucleotide
  Sense strand starting at position 3712 of SEQ ID NO: 1889128
augagauugcuuggguuua

SEQ ID NO: 2580227 - RNA, 19 nt, Artificial Sequence
  Description of Artificial Sequence: Synthetic oligonucleotide
  Antisense strand to SEQ ID NO: 2580226
uaaacccaagcaaucucau

SEQ ID NO: 2580228 - RNA, 19 nt, Artificial Sequence
  Description of Artificial Sequence: Synthetic oligonucleotide
  Sense strand starting at position 3714 of SEQ ID NO: 1889128
gagauugcuuggguuuaag

SEQ ID NO: 2580229 - RNA, 19 nt, Artificial Sequence
  Description of Artificial Sequence: Synthetic oligonucleotide
  Antisense strand to SEQ ID NO: 2580228
cuuaaacccaagcaaucuc

SEQ ID NO: 2580230 - RNA, 19 nt, Artificial Sequence
  Description of Artificial Sequence: Synthetic oligonucleotide
  Sense strand starting at position 3817 of SEQ ID NO: 1889128
ugucauauugauuagcuga

SEQ ID NO: 2580231 - RNA, 19 nt, Artificial Sequence
  Description of Artificial Sequence: Synthetic oligonucleotide
  Antisense strand to SEQ ID NO: 2580230
ucagcuaaucaauaugaca

SEQ ID NO: 2580232 - RNA, 19 nt, Artificial Sequence
  Description of Artificial Sequence: Synthetic oligonucleotide
  Sense strand starting at position 11 of SEQ ID NO: 1889130
acccaagguuaugugaaua

SEQ ID NO: 2580233 - RNA, 19 nt, Artificial Sequence
  Description of Artificial Sequence: Synthetic oligonucleotide
  Antisense strand to SEQ ID NO: 2580232
uauucacauaaccuugggu

SEQ ID NO: 2580234 - RNA, 19 nt, Artificial Sequence
  Description of Artificial Sequence: Synthetic oligonucleotide
  Sense strand starting at position 21 of SEQ ID NO: 1889130
augugaauauaucccgaga

SEQ ID NO: 2580235 - RNA, 19 nt, Artificial Sequence
  Description of Artificial Sequence: Synthetic oligonucleotide
  Antisense strand to SEQ ID NO: 2580234
ucucgggauauauucacau

SEQ ID NO: 2580236 - RNA, 19 nt, Artificial Sequence
  Description of Artificial Sequence: Synthetic oligonucleotide
  Sense strand starting at position 117 of SEQ ID NO: 1889130
gacuaagaagagugcuuaa

SEQ ID NO: 2580237 - RNA, 19 nt, Artificial Sequence
  Description of Artificial Sequence: Synthetic oligonucleotide
  Antisense strand to SEQ ID NO: 2580236
uuaagcacucuucuuaguc

SEQ ID NO: 2580238 - RNA, 19 nt, Artificial Sequence
  Description of Artificial Sequence: Synthetic oligonucleotide
  Sense strand starting at position 120 of SEQ ID NO: 1889130
uaagaagagugcuuaauga

SEQ ID NO: 2580239 - RNA, 19 nt, Artificial Sequence
  Description of Artificial Sequence: Synthetic oligonucleotide
  Antisense strand to SEQ ID NO: 2580238
ucauuaagcacucuucuua

SEQ ID NO: 2580240 - RNA, 19 nt, Artificial Sequence
  Description of Artificial Sequence: Synthetic oligonucleotide
  Sense strand starting at position 292 of SEQ ID NO: 1889130
ugagucauacagugagaag

SEQ ID NO: 2580241 - RNA, 19 nt, Artificial Sequence
  Description of Artificial Sequence: Synthetic oligonucleotide
  Antisense strand to SEQ ID NO: 2580240
cuucucacuguaugacuca

SEQ ID NO: 2580242 - RNA, 19 nt, Artificial Sequence
  Description of Artificial Sequence: Synthetic oligonucleotide
  Sense strand starting at position 310 of SEQ ID NO: 1889130
gcagcuuaaggucauuaaa

SEQ ID NO: 2580243 - RNA, 19 nt, Artificial Sequence
  Description of Artificial Sequence: Synthetic oligonucleotide
  Antisense strand to SEQ ID NO: 2580242
uuuaaugaccuuaagcugc

SEQ ID NO: 2580244 - RNA, 19 nt, Artificial Sequence
  Description of Artificial Sequence: Synthetic oligonucleotide
  Sense strand starting at position 402 of SEQ ID NO: 1889130
gacuguugcagugauaaug

SEQ ID NO: 2580245 - RNA, 19 nt, Artificial Sequence
  Description of Artificial Sequence: Synthetic oligonucleotide
  Antisense strand to SEQ ID NO: 2580244
cauuaucacugcaacaguc

SEQ ID NO: 2580246 - RNA, 19 nt, Artificial Sequence
  Description of Artificial Sequence: Synthetic oligonucleotide
  Sense strand starting at position 512 of SEQ ID NO: 1889130
agucacauagaguaaguau

SEQ ID NO: 2580247 - RNA, 19 nt, Artificial Sequence
  Description of Artificial Sequence: Synthetic oligonucleotide
  Antisense strand to SEQ ID NO: 2580246
auacuuacucuaugugacu

SEQ ID NO: 2580248 - RNA, 19 nt, Artificial Sequence
  Description of Artificial Sequence: Synthetic oligonucleotide
  Sense strand starting at position 1325 of SEQ ID NO: 1889130
auaugaucuuguuugacau

SEQ ID NO: 2580249 - RNA, 19 nt, Artificial Sequence
  Description of Artificial Sequence: Synthetic oligonucleotide
  Antisense strand to SEQ ID NO: 2580248
augucaaacaagaucauau

SEQ ID NO: 2580250 - RNA, 19 nt, Artificial Sequence
  Description of Artificial Sequence: Synthetic oligonucleotide
  Sense strand starting at position 1326 of SEQ ID NO: 1889130
uaugaucuuguuugacaug

SEQ ID NO: 2580251 - RNA, 19 nt, Artificial Sequence
  Description of Artificial Sequence: Synthetic oligonucleotide
  Antisense strand to SEQ ID NO: 2580250
caugucaaacaagaucaua

SEQ ID NO: 2580252 - RNA, 19 nt, Artificial Sequence
  Description of Artificial Sequence: Synthetic oligonucleotide
  Sense strand starting at position 1582 of SEQ ID NO: 1889130
gaaugagcuuuaguaaccu

SEQ ID NO: 2580253 - RNA, 19 nt, Artificial Sequence
  Description of Artificial Sequence: Synthetic oligonucleotide
  Antisense strand to SEQ ID NO: 2580252
agguuacuaaagcucauuc

SEQ ID NO: 2580254 - RNA, 19 nt, Artificial Sequence
  Description of Artificial Sequence: Synthetic oligonucleotide
  Sense strand starting at position 1669 of SEQ ID NO: 1889130
ucaucuagacaugguucua

SEQ ID NO: 2580255 - RNA, 19 nt, Artificial Sequence
  Description of Artificial Sequence: Synthetic oligonucleotide
  Antisense strand to SEQ ID NO: 2580254
uagaaccaugucuagauga

SEQ ID NO: 2580256 - RNA, 19 nt, Artificial Sequence
  Description of Artificial Sequence: Synthetic oligonucleotide
  Sense strand starting at position 1782 of SEQ ID NO: 1889130
acugaugcacuuuggauau

SEQ ID NO: 2580257 - RNA, 19 nt, Artificial Sequence
  Description of Artificial Sequence: Synthetic oligonucleotide
  Antisense strand to SEQ ID NO: 2580256
auauccaaagugcaucagu

SEQ ID NO: 2580258 - RNA, 19 nt, Artificial Sequence
  Description of Artificial Sequence: Synthetic oligonucleotide
  Sense strand starting at position 1920 of SEQ ID NO: 1889130
acaacauguguccagaugu

SEQ ID NO: 2580259 - RNA, 19 nt, Artificial Sequence
  Description of Artificial Sequence: Synthetic oligonucleotide
  Antisense strand to SEQ ID NO: 2580258
acaucuggacacauguugu

SEQ ID NO: 2580260 - RNA, 19 nt, Artificial Sequence
  Description of Artificial Sequence: Synthetic oligonucleotide
  Sense strand starting at position 2211 of SEQ ID NO: 1889130
uuccuuagucaugaugagu

SEQ ID NO: 2580261 - RNA, 19 nt, Artificial Sequence
  Description of Artificial Sequence: Synthetic oligonucleotide
  Antisense strand to SEQ ID NO: 2580260
acucaucaugacuaaggaa

SEQ ID NO: 2580262 - RNA, 19 nt, Artificial Sequence
  Description of Artificial Sequence: Synthetic oligonucleotide
  Sense strand starting at position 2220 of SEQ ID NO: 1889130
caugaugagucaguuacac

SEQ ID NO: 2580263 - RNA, 19 nt, Artificial Sequence
  Description of Artificial Sequence: Synthetic oligonucleotide
  Antisense strand to SEQ ID NO: 2580262
guguaacugacucaucaug

SEQ ID NO: 2580264 - RNA, 19 nt, Artificial Sequence
  Description of Artificial Sequence: Synthetic oligonucleotide
  Sense strand starting at position 2222 of SEQ ID NO: 1889130
ugaugagucaguuacacug

SEQ ID NO: 2580265 - RNA, 19 nt, Artificial Sequence
  Description of Artificial Sequence: Synthetic oligonucleotide
  Antisense strand to SEQ ID NO: 2580264
caguguaacugacucauca

SEQ ID NO: 2580266 - RNA, 19 nt, Artificial Sequence
  Description of Artificial Sequence: Synthetic oligonucleotide
  Sense strand starting at position 2228 of SEQ ID NO: 1889130
gucaguuacacugggaauc

SEQ ID NO: 2580267 - RNA, 19 nt, Artificial Sequence
  Description of Artificial Sequence: Synthetic oligonucleotide
  Antisense strand to SEQ ID NO: 2580266
gauucccaguguaacugac

SEQ ID NO: 2580268 - RNA, 19 nt, Artificial Sequence
  Description of Artificial Sequence: Synthetic oligonucleotide
  Sense strand starting at position 2375 of SEQ ID NO: 1889130
cagagaggcuuuguuuaga

SEQ ID NO: 2580269 - RNA, 19 nt, Artificial Sequence
  Description of Artificial Sequence: Synthetic oligonucleotide
  Antisense strand to SEQ ID NO: 2580268
ucuaaacaaagccucucug

SEQ ID NO: 2580270 - RNA, 19 nt, Artificial Sequence
  Description of Artificial Sequence: Synthetic oligonucleotide
  Sense strand starting at position 2783 of SEQ ID NO: 1889130
ucgcaugugccgucucaau

SEQ ID NO: 2580271 - RNA, 19 nt, Artificial Sequence
  Description of Artificial Sequence: Synthetic oligonucleotide
  Antisense strand to SEQ ID NO: 2580270
auugagacggcacaugcga

SEQ ID NO: 2580272 - RNA, 19 nt, Artificial Sequence
  Description of Artificial Sequence: Synthetic oligonucleotide
  Sense strand starting at position 2785 of SEQ ID NO: 1889130
gcaugugccgucucaauag

SEQ ID NO: 2580273 - RNA, 19 nt, Artificial Sequence
  Description of Artificial Sequence: Synthetic oligonucleotide
  Antisense strand to SEQ ID NO: 2580272
cuauugagacggcacaugc

SEQ ID NO: 2580274 - RNA, 19 nt, Artificial Sequence
  Description of Artificial Sequence: Synthetic oligonucleotide
  Sense strand starting at position 2876 of SEQ ID NO: 1889130
ugaugaggauuggcuguaa

SEQ ID NO: 2580275 - RNA, 19 nt, Artificial Sequence
  Description of Artificial Sequence: Synthetic oligonucleotide
  Antisense strand to SEQ ID NO: 2580274
uuacagccaauccucauca

SEQ ID NO: 2580276 - RNA, 19 nt, Artificial Sequence
  Description of Artificial Sequence: Synthetic oligonucleotide
  Sense strand starting at position 2975 of SEQ ID NO: 1889130
gugguaauacaagauguga

SEQ ID NO: 2580277 - RNA, 19 nt, Artificial Sequence
  Description of Artificial Sequence: Synthetic oligonucleotide
  Antisense strand to SEQ ID NO: 2580276
ucacaucuuguauuaccac

SEQ ID NO: 2580278 - RNA, 19 nt, Artificial Sequence
  Description of Artificial Sequence: Synthetic oligonucleotide
  Sense strand starting at position 2977 of SEQ ID NO: 1889130
gguaauacaagaugugaau

SEQ ID NO: 2580279 - RNA, 19 nt, Artificial Sequence
  Description of Artificial Sequence: Synthetic oligonucleotide
  Antisense strand to SEQ ID NO: 2580278
auucacaucuuguauuacc

SEQ ID NO: 2580280 - RNA, 19 nt, Artificial Sequence
  Description of Artificial Sequence: Synthetic oligonucleotide
  Sense strand starting at position 3020 of SEQ ID NO: 1889130
gguuguucugacguguguu

SEQ ID NO: 2580281 - RNA, 19 nt, Artificial Sequence
  Description of Artificial Sequence: Synthetic oligonucleotide
  Antisense strand to SEQ ID NO: 2580280
aacacacgucagaacaacc

SEQ ID NO: 2580282 - RNA, 19 nt, Artificial Sequence
  Description of Artificial Sequence: Synthetic oligonucleotide
  Sense strand starting at position 3039 of SEQ ID NO: 1889130
cauguuagacuuggauaca

SEQ ID NO: 2580283 - RNA, 19 nt, Artificial Sequence
  Description of Artificial Sequence: Synthetic oligonucleotide
  Antisense strand to SEQ ID NO: 2580282
uguauccaagucuaacaug

SEQ ID NO: 2580284 - RNA, 19 nt, Artificial Sequence
  Description of Artificial Sequence: Synthetic oligonucleotide
  Sense strand starting at position 3042 of SEQ ID NO: 1889130
guuagacuuggauacaugu

SEQ ID NO: 2580285 - RNA, 19 nt, Artificial Sequence
  Description of Artificial Sequence: Synthetic oligonucleotide
  Antisense strand to SEQ ID NO: 2580284
acauguauccaagucuaac

SEQ ID NO: 2580286 - RNA, 19 nt, Artificial Sequence
  Description of Artificial Sequence: Synthetic oligonucleotide
  Sense strand starting at position 3049 of SEQ ID NO: 1889130
uuggauacauguuugugaa

SEQ ID NO: 2580287 - RNA, 19 nt, Artificial Sequence
  Description of Artificial Sequence: Synthetic oligonucleotide
  Antisense strand to SEQ ID NO: 2580286
uucacaaacauguauccaa

SEQ ID NO: 2580288 - RNA, 19 nt, Artificial Sequence
  Description of Artificial Sequence: Synthetic oligonucleotide
  Sense strand starting at position 3050 of SEQ ID NO: 1889130
uggauacauguuugugaag

SEQ ID NO: 2580289 - RNA, 19 nt, Artificial Sequence
  Description of Artificial Sequence: Synthetic oligonucleotide
  Antisense strand to SEQ ID NO: 2580288
cuucacaaacauguaucca

SEQ ID NO: 2580290 - RNA, 19 nt, Artificial Sequence
  Description of Artificial Sequence: Synthetic oligonucleotide
  Sense strand starting at position 3051 of SEQ ID NO: 1889130
ggauacauguuugugaaga

SEQ ID NO: 2580291 - RNA, 19 nt, Artificial Sequence
  Description of Artificial Sequence: Synthetic oligonucleotide
  Antisense strand to SEQ ID NO: 2580290
ucuucacaaacauguaucc

SEQ ID NO: 2580292 - RNA, 19 nt, Artificial Sequence
  Description of Artificial Sequence: Synthetic oligonucleotide
  Sense strand starting at position 3061 of SEQ ID NO: 1889130
uugugaagagugcaauauc

SEQ ID NO: 2580293 - RNA, 19 nt, Artificial Sequence
  Description of Artificial Sequence: Synthetic oligonucleotide
  Antisense strand to SEQ ID NO: 2580292
gauauugcacucuucacaa

SEQ ID NO: 2580294 - RNA, 19 nt, Artificial Sequence
  Description of Artificial Sequence: Synthetic oligonucleotide
  Sense strand starting at position 3101 of SEQ ID NO: 1889130
gguccaguacuggaccaua

SEQ ID NO: 2580295 - RNA, 19 nt, Artificial Sequence
  Description of Artificial Sequence: Synthetic oligonucleotide
  Antisense strand to SEQ ID NO: 2580294
uaugguccaguacuggacc

SEQ ID NO: 2580296 - RNA, 19 nt, Artificial Sequence
  Description of Artificial Sequence: Synthetic oligonucleotide
  Sense strand starting at position 3200 of SEQ ID NO: 1889130
gaaggucuuaagugaugug

SEQ ID NO: 2580297 - RNA, 19 nt, Artificial Sequence
  Description of Artificial Sequence: Synthetic oligonucleotide
  Antisense strand to SEQ ID NO: 2580296
cacaucacuuaagaccuuc

SEQ ID NO: 2580298 - RNA, 19 nt, Artificial Sequence
  Description of Artificial Sequence: Synthetic oligonucleotide
  Sense strand starting at position 3201 of SEQ ID NO: 1889130
aaggucuuaagugauguga

SEQ ID NO: 2580299 - RNA, 19 nt, Artificial Sequence
  Description of Artificial Sequence: Synthetic oligonucleotide
  Antisense strand to SEQ ID NO: 2580298
ucacaucacuuaagaccuu

SEQ ID NO: 2580300 - RNA, 19 nt, Artificial Sequence
  Description of Artificial Sequence: Synthetic oligonucleotide
  Sense strand starting at position 3237 of SEQ ID NO: 1889130
gggacagcauccucaagua

SEQ ID NO: 2580301 - RNA, 19 nt, Artificial Sequence
  Description of Artificial Sequence: Synthetic oligonucleotide
  Antisense strand to SEQ ID NO: 2580300
uacuugaggaugcuguccc

SEQ ID NO: 2580302 - RNA, 19 nt, Artificial Sequence
  Description of Artificial Sequence: Synthetic oligonucleotide
  Sense strand starting at position 3261 of SEQ ID NO: 1889130
gugagcucaauguaauaga

SEQ ID NO: 2580303 - RNA, 19 nt, Artificial Sequence
  Description of Artificial Sequence: Synthetic oligonucleotide
  Antisense strand to SEQ ID NO: 2580302
ucuauuacauugagcucac

SEQ ID NO: 2580304 - RNA, 19 nt, Artificial Sequence
  Description of Artificial Sequence: Synthetic oligonucleotide
  Sense strand starting at position 3373 of SEQ ID NO: 1889130
ggcuauuaacguggaagag

SEQ ID NO: 2580305 - RNA, 19 nt, Artificial Sequence
  Description of Artificial Sequence: Synthetic oligonucleotide
  Antisense strand to SEQ ID NO: 2580304
cucuuccacguuaauagcc

SEQ ID NO: 2580306 - RNA, 19 nt, Artificial Sequence
  Description of Artificial Sequence: Synthetic oligonucleotide
  Sense strand starting at position 3531 of SEQ ID NO: 1889130
ggguuaagccaccaaguuu

SEQ ID NO: 2580307 - RNA, 19 nt, Artificial Sequence
  Description of Artificial Sequence: Synthetic oligonucleotide
  Antisense strand to SEQ ID NO: 2580306
aaacuugguggcuuaaccc

SEQ ID NO: 2580308 - RNA, 19 nt, Artificial Sequence
  Description of Artificial Sequence: Synthetic oligonucleotide
  Sense strand starting at position 3554 of SEQ ID NO: 1889130
auguuauggcaacaacuaa

SEQ ID NO: 2580309 - RNA, 19 nt, Artificial Sequence
  Description of Artificial Sequence: Synthetic oligonucleotide
  Antisense strand to SEQ ID NO: 2580308
uuaguuguugccauaacau

SEQ ID NO: 2580310 - RNA, 19 nt, Artificial Sequence
  Description of Artificial Sequence: Synthetic oligonucleotide
  Sense strand starting at position 3632 of SEQ ID NO: 1889130
gagggugaaucuccugaua

SEQ ID NO: 2580311 - RNA, 19 nt, Artificial Sequence
  Description of Artificial Sequence: Synthetic oligonucleotide
  Antisense strand to SEQ ID NO: 2580310
uaucaggagauucacccuc

SEQ ID NO: 2580312 - RNA, 19 nt, Artificial Sequence
  Description of Artificial Sequence: Synthetic oligonucleotide
  Sense strand starting at position 26 of SEQ ID NO: 1889132
acggcuggaccucaucaau

SEQ ID NO: 2580313 - RNA, 19 nt, Artificial Sequence
  Description of Artificial Sequence: Synthetic oligonucleotide
  Antisense strand to SEQ ID NO: 2580312
auugaugagguccagccgu

SEQ ID NO: 2580314 - RNA, 19 nt, Artificial Sequence
  Description of Artificial Sequence: Synthetic oligonucleotide
  Sense strand starting at position 55 of SEQ ID NO: 1889132
cgagcuguauuuccaccua

SEQ ID NO: 2580315 - RNA, 19 nt, Artificial Sequence
  Description of Artificial Sequence: Synthetic oligonucleotide
  Antisense strand to SEQ ID NO: 2580314
uagguggaaauacagcucg

SEQ ID NO: 2580316 - RNA, 19 nt, Artificial Sequence
  Description of Artificial Sequence: Synthetic oligonucleotide
  Sense strand starting at position 580 of SEQ ID NO: 1889132
aggaguuaagaggguuuga

SEQ ID NO: 2580317 - RNA, 19 nt, Artificial Sequence
  Description of Artificial Sequence: Synthetic oligonucleotide
  Antisense strand to SEQ ID NO: 2580316
ucaaacccucuuaacuccu

SEQ ID NO: 2580318 - RNA, 19 nt, Artificial Sequence
  Description of Artificial Sequence: Synthetic oligonucleotide
  Sense strand starting at position 713 of SEQ ID NO: 1889132
ggugacaacuguuuaaauc

SEQ ID NO: 2580319 - RNA, 19 nt, Artificial Sequence
  Description of Artificial Sequence: Synthetic oligonucleotide
  Antisense strand to SEQ ID NO: 2580318
gauuuaaacaguugucacc

SEQ ID NO: 2580320 - RNA, 19 nt, Artificial Sequence
  Description of Artificial Sequence: Synthetic oligonucleotide
  Sense strand starting at position 737 of SEQ ID NO: 1889132
cccacaugccgcugggaua

SEQ ID NO: 2580321 - RNA, 19 nt, Artificial Sequence
  Description of Artificial Sequence: Synthetic oligonucleotide
  Antisense strand to SEQ ID NO: 2580320
uaucccagcggcauguggg

SEQ ID NO: 2580322 - RNA, 19 nt, Artificial Sequence
  Description of Artificial Sequence: Synthetic oligonucleotide
  Sense strand starting at position 750 of SEQ ID NO: 1889132
gggauauucugacccacuc

SEQ ID NO: 2580323 - RNA, 19 nt, Artificial Sequence
  Description of Artificial Sequence: Synthetic oligonucleotide
  Antisense strand to SEQ ID NO: 2580322
gagugggucagaauauccc

SEQ ID NO: 2580324 - RNA, 19 nt, Artificial Sequence
  Description of Artificial Sequence: Synthetic oligonucleotide
  Sense strand starting at position 818 of SEQ ID NO: 1889132
acucgaaaccucugucaag

SEQ ID NO: 2580325 - RNA, 19 nt, Artificial Sequence
  Description of Artificial Sequence: Synthetic oligonucleotide
  Antisense strand to SEQ ID NO: 2580324
cuugacagagguuucgagu

SEQ ID NO: 2580326 - RNA, 19 nt, Artificial Sequence
  Description of Artificial Sequence: Synthetic oligonucleotide
  Sense strand starting at position 881 of SEQ ID NO: 1889132
ggauaaagcguccaauaca

SEQ ID NO: 2580327 - RNA, 19 nt, Artificial Sequence
  Description of Artificial Sequence: Synthetic oligonucleotide
  Antisense strand to SEQ ID NO: 2580326
uguauuggacgcuuuaucc

SEQ ID NO: 2580328 - RNA, 19 nt, Artificial Sequence
  Description of Artificial Sequence: Synthetic oligonucleotide
  Sense strand starting at position 1151 of SEQ ID NO: 1889132
cgagguacucuaggcgaga

SEQ ID NO: 2580329 - RNA, 19 nt, Artificial Sequence
  Description of Artificial Sequence: Synthetic oligonucleotide
  Antisense strand to SEQ ID NO: 2580328
ucucgccuagaguaccucg

SEQ ID NO: 2580330 - RNA, 19 nt, Artificial Sequence
  Description of Artificial Sequence: Synthetic oligonucleotide
  Sense strand starting at position 1152 of SEQ ID NO: 1889132
gagguacucuaggcgagau

SEQ ID NO: 2580331 - RNA, 19 nt, Artificial Sequence
  Description of Artificial Sequence: Synthetic oligonucleotide
  Antisense strand to SEQ ID NO: 2580330
aucucgccuagaguaccuc

SEQ ID NO: 2580332 - RNA, 19 nt, Artificial Sequence
  Description of Artificial Sequence: Synthetic oligonucleotide
  Sense strand starting at position 1232 of SEQ ID NO: 1889132
gauacagaguggucuucca

SEQ ID NO: 2580333 - RNA, 19 nt, Artificial Sequence
  Description of Artificial Sequence: Synthetic oligonucleotide
  Antisense strand to SEQ ID NO: 2580332
uggaagaccacucuguauc

SEQ ID NO: 2580334 - RNA, 19 nt, Artificial Sequence
  Description of Artificial Sequence: Synthetic oligonucleotide
  Sense strand starting at position 2397 of SEQ ID NO: 1889132
uggaauuagccuggcuacu

SEQ ID NO: 2580335 - RNA, 19 nt, Artificial Sequence
  Description of Artificial Sequence: Synthetic oligonucleotide
  Antisense strand to SEQ ID NO: 2580334
aguagccaggcuaauucca

SEQ ID NO: 2580336 - RNA, 19 nt, Artificial Sequence
  Description of Artificial Sequence: Synthetic oligonucleotide
  Sense strand starting at position 2648 of SEQ ID NO: 1889132
ccaaauguagcgugugaaa

SEQ ID NO: 2580337 - RNA, 19 nt, Artificial Sequence
  Description of Artificial Sequence: Synthetic oligonucleotide
  Antisense strand to SEQ ID NO: 2580336
uuucacacgcuacauuugg

SEQ ID NO: 2580338 - RNA, 19 nt, Artificial Sequence
  Description of Artificial Sequence: Synthetic oligonucleotide
  Sense strand starting at position 2664 of SEQ ID NO: 1889132
aaacuugauuggucacugu

SEQ ID NO: 2580339 - RNA, 19 nt, Artificial Sequence
  Description of Artificial Sequence: Synthetic oligonucleotide
  Antisense strand to SEQ ID NO: 2580338
acagugaccaaucaaguuu

SEQ ID NO: 2580340 - RNA, 19 nt, Artificial Sequence
  Description of Artificial Sequence: Synthetic oligonucleotide
  Sense strand starting at position 2667 of SEQ ID NO: 1889132
cuugauuggucacuguuua

SEQ ID NO: 2580341 - RNA, 19 nt, Artificial Sequence
  Description of Artificial Sequence: Synthetic oligonucleotide
  Antisense strand to SEQ ID NO: 2580340
uaaacagugaccaaucaag

SEQ ID NO: 2580342 - RNA, 19 nt, Artificial Sequence
  Description of Artificial Sequence: Synthetic oligonucleotide
  Sense strand starting at position 2668 of SEQ ID NO: 1889132
uugauuggucacuguuuaa

SEQ ID NO: 2580343 - RNA, 19 nt, Artificial Sequence
  Description of Artificial Sequence: Synthetic oligonucleotide
  Antisense strand to SEQ ID NO: 2580342
uuaaacagugaccaaucaa

SEQ ID NO: 2580344 - RNA, 19 nt, Artificial Sequence
  Description of Artificial Sequence: Synthetic oligonucleotide
  Sense strand starting at position 2671 of SEQ ID NO: 1889132
auuggucacuguuuaaaca

SEQ ID NO: 2580345 - RNA, 19 nt, Artificial Sequence
  Description of Artificial Sequence: Synthetic oligonucleotide
  Antisense strand to SEQ ID NO: 2580344
uguuuaaacagugaccaau

SEQ ID NO: 2580346 - RNA, 19 nt, Artificial Sequence
  Description of Artificial Sequence: Synthetic oligonucleotide
  Sense strand starting at position 2766 of SEQ ID NO: 1889132
guaaguguggcuuaggcaa

SEQ ID NO: 2580347 - RNA, 19 nt, Artificial Sequence
  Description of Artificial Sequence: Synthetic oligonucleotide
  Antisense strand to SEQ ID NO: 2580346
uugccuaagccacacuuac

SEQ ID NO: 2580348 - RNA, 19 nt, Artificial Sequence
  Description of Artificial Sequence: Synthetic oligonucleotide
  Sense strand starting at position 2778 of SEQ ID NO: 1889132
uaggcaauaguuggacaua

SEQ ID NO: 2580349 - RNA, 19 nt, Artificial Sequence
  Description of Artificial Sequence: Synthetic oligonucleotide
  Antisense strand to SEQ ID NO: 2580348
uauguccaacuauugccua

SEQ ID NO: 2580350 - RNA, 19 nt, Artificial Sequence
  Description of Artificial Sequence: Synthetic oligonucleotide
  Sense strand starting at position 2781 of SEQ ID NO: 1889132
gcaauaguuggacauacuu

SEQ ID NO: 2580351 - RNA, 19 nt, Artificial Sequence
  Description of Artificial Sequence: Synthetic oligonucleotide
  Antisense strand to SEQ ID NO: 2580350
aaguauguccaacuauugc

SEQ ID NO: 2580352 - RNA, 19 nt, Artificial Sequence
  Description of Artificial Sequence: Synthetic oligonucleotide
  Sense strand starting at position 2807 of SEQ ID NO: 1889132
aaacucuuauccgugugga

SEQ ID NO: 2580353 - RNA, 19 nt, Artificial Sequence
  Description of Artificial Sequence: Synthetic oligonucleotide
  Antisense strand to SEQ ID NO: 2580352
uccacacggauaagaguuu

SEQ ID NO: 2580354 - RNA, 19 nt, Artificial Sequence
  Description of Artificial Sequence: Synthetic oligonucleotide
  Sense strand starting at position 2808 of SEQ ID NO: 1889132
aacucuuauccguguggau

SEQ ID NO: 2580355 - RNA, 19 nt, Artificial Sequence
  Description of Artificial Sequence: Synthetic oligonucleotide
  Antisense strand to SEQ ID NO: 2580354
auccacacggauaagaguu

SEQ ID NO: 2580356 - RNA, 19 nt, Artificial Sequence
  Description of Artificial Sequence: Synthetic oligonucleotide
  Sense strand starting at position 2810 of SEQ ID NO: 1889132
cucuuauccguguggauuu

SEQ ID NO: 2580357 - RNA, 19 nt, Artificial Sequence
  Description of Artificial Sequence: Synthetic oligonucleotide
  Antisense strand to SEQ ID NO: 2580356
aaauccacacggauaagag

SEQ ID NO: 2580358 - RNA, 19 nt, Artificial Sequence
  Description of Artificial Sequence: Synthetic oligonucleotide
  Sense strand starting at position 2832 of SEQ ID NO: 1889132
augcaaauauagcuagaua

SEQ ID NO: 2580359 - RNA, 19 nt, Artificial Sequence
  Description of Artificial Sequence: Synthetic oligonucleotide
  Antisense strand to SEQ ID NO: 2580358
uaucuagcuauauuugcau

SEQ ID NO: 2580360 - RNA, 19 nt, Artificial Sequence
  Description of Artificial Sequence: Synthetic oligonucleotide
  Sense strand starting at position 2877 of SEQ ID NO: 1889132
ugcagacagugcuuaacuu

SEQ ID NO: 2580361 - RNA, 19 nt, Artificial Sequence
  Description of Artificial Sequence: Synthetic oligonucleotide
  Antisense strand to SEQ ID NO: 2580360
aaguuaagcacugucugca

SEQ ID NO: 2580362 - RNA, 19 nt, Artificial Sequence
  Description of Artificial Sequence: Synthetic oligonucleotide
  Sense strand starting at position 3014 of SEQ ID NO: 1889132
gagggaucucagcgauucu

SEQ ID NO: 2580363 - RNA, 19 nt, Artificial Sequence
  Description of Artificial Sequence: Synthetic oligonucleotide
  Antisense strand to SEQ ID NO: 2580362
agaaucgcugagaucccuc

SEQ ID NO: 2580364 - RNA, 19 nt, Artificial Sequence
  Description of Artificial Sequence: Synthetic oligonucleotide
  Sense strand starting at position 3091 of SEQ ID NO: 1889132
caaagcggccucuaaguua

SEQ ID NO: 2580365 - RNA, 19 nt, Artificial Sequence
  Description of Artificial Sequence: Synthetic oligonucleotide
  Antisense strand to SEQ ID NO: 2580364
uaacuuagaggccgcuuug

SEQ ID NO: 2580366 - RNA, 19 nt, Artificial Sequence
  Description of Artificial Sequence: Synthetic oligonucleotide
  Sense strand starting at position 3102 of SEQ ID NO: 1889132
cuaaguuagaacggacaca

SEQ ID NO: 2580367 - RNA, 19 nt, Artificial Sequence
  Description of Artificial Sequence: Synthetic oligonucleotide
  Antisense strand to SEQ ID NO: 2580366
uguguccguucuaacuuag

SEQ ID NO: 2580368 - RNA, 19 nt, Artificial Sequence
  Description of Artificial Sequence: Synthetic oligonucleotide
  Sense strand starting at position 3285 of SEQ ID NO: 1889132
gcucucuaugcgcugcaaa

SEQ ID NO: 2580369 - RNA, 19 nt, Artificial Sequence
  Description of Artificial Sequence: Synthetic oligonucleotide
  Antisense strand to SEQ ID NO: 2580368
uuugcagcgcauagagagc

SEQ ID NO: 2580370 - RNA, 19 nt, Artificial Sequence
  Description of Artificial Sequence: Synthetic oligonucleotide
  Sense strand starting at position 3416 of SEQ ID NO: 1889132
ccuugauccugguuaggac

SEQ ID NO: 2580371 - RNA, 19 nt, Artificial Sequence
  Description of Artificial Sequence: Synthetic oligonucleotide
  Antisense strand to SEQ ID NO: 2580370
guccuaaccaggaucaagg

SEQ ID NO: 2580372 - RNA, 19 nt, Artificial Sequence
  Description of Artificial Sequence: Synthetic oligonucleotide
  Sense strand starting at position 3543 of SEQ ID NO: 1889132
agggccugaccuuggaaau

SEQ ID NO: 2580373 - RNA, 19 nt, Artificial Sequence
  Description of Artificial Sequence: Synthetic oligonucleotide
  Antisense strand to SEQ ID NO: 2580372
auuuccaaggucaggcccu

SEQ ID NO: 2580374 - RNA, 19 nt, Artificial Sequence
  Description of Artificial Sequence: Synthetic oligonucleotide
  Sense strand starting at position 3544 of SEQ ID NO: 1889132
gggccugaccuuggaaaug

SEQ ID NO: 2580375 - RNA, 19 nt, Artificial Sequence
  Description of Artificial Sequence: Synthetic oligonucleotide
  Antisense strand to SEQ ID NO: 2580374
cauuuccaaggucaggccc

SEQ ID NO: 2580376 - RNA, 19 nt, Artificial Sequence
  Description of Artificial Sequence: Synthetic oligonucleotide
  Sense strand starting at position 3626 of SEQ ID NO: 1889132
ugucuuugccugcaaauug

SEQ ID NO: 2580377 - RNA, 19 nt, Artificial Sequence
  Description of Artificial Sequence: Synthetic oligonucleotide
  Antisense strand to SEQ ID NO: 2580376
caauuugcaggcaaagaca

SEQ ID NO: 2580378 - RNA, 19 nt, Artificial Sequence
  Description of Artificial Sequence: Synthetic oligonucleotide
  Sense strand starting at position 3667 of SEQ ID NO: 1889132
acagauuugcagcguuaac

SEQ ID NO: 2580379 - RNA, 19 nt, Artificial Sequence
  Description of Artificial Sequence: Synthetic oligonucleotide
  Antisense strand to SEQ ID NO: 2580378
guuaacgcugcaaaucugu

SEQ ID NO: 2580380 - RNA, 19 nt, Artificial Sequence
  Description of Artificial Sequence: Synthetic oligonucleotide
  Sense strand starting at position 3869 of SEQ ID NO: 1889132
ccuauuacuugagagacaa

SEQ ID NO: 2580381 - RNA, 19 nt, Artificial Sequence
  Description of Artificial Sequence: Synthetic oligonucleotide
  Antisense strand to SEQ ID NO: 2580380
uugucucucaaguaauagg

SEQ ID NO: 2580382 - RNA, 19 nt, Artificial Sequence
  Description of Artificial Sequence: Synthetic oligonucleotide
  Sense strand starting at position 3890 of SEQ ID NO: 1889132
aaggaaagugccuaugagu

SEQ ID NO: 2580383 - RNA, 19 nt, Artificial Sequence
  Description of Artificial Sequence: Synthetic oligonucleotide
  Antisense strand to SEQ ID NO: 2580382
acucauaggcacuuuccuu

SEQ ID NO: 2580384 - RNA, 19 nt, Artificial Sequence
  Description of Artificial Sequence: Synthetic oligonucleotide
  Sense strand starting at position 3897 of SEQ ID NO: 1889132
gugccuaugaguuagacau

SEQ ID NO: 2580385 - RNA, 19 nt, Artificial Sequence
  Description of Artificial Sequence: Synthetic oligonucleotide
  Antisense strand to SEQ ID NO: 2580384
augucuaacucauaggcac

SEQ ID NO: 2580386 - RNA, 19 nt, Artificial Sequence
  Description of Artificial Sequence: Synthetic oligonucleotide
  Sense strand starting at position 3920 of SEQ ID NO: 1889132
gagucauuaucgccuuaau

SEQ ID NO: 2580387 - RNA, 19 nt, Artificial Sequence
  Description of Artificial Sequence: Synthetic oligonucleotide
  Antisense strand to SEQ ID NO: 2580386
auuaaggcgauaaugacuc

SEQ ID NO: 2580388 - RNA, 19 nt, Artificial Sequence
  Description of Artificial Sequence: Synthetic oligonucleotide
  Sense strand starting at position 3923 of SEQ ID NO: 1889132
ucauuaucgccuuaaugaa

SEQ ID NO: 2580389 - RNA, 19 nt, Artificial Sequence
  Description of Artificial Sequence: Synthetic oligonucleotide
  Antisense strand to SEQ ID NO: 2580388
uucauuaaggcgauaauga

SEQ ID NO: 2580390 - RNA, 19 nt, Artificial Sequence
  Description of Artificial Sequence: Synthetic oligonucleotide
  Sense strand starting at position 3931 of SEQ ID NO: 1889132
gccuuaaugaaguggcauu

SEQ ID NO: 2580391 - RNA, 19 nt, Artificial Sequence
  Description of Artificial Sequence: Synthetic oligonucleotide
  Antisense strand to SEQ ID NO: 2580390
aaugccacuucauuaaggc

SEQ ID NO: 2580392 - RNA, 19 nt, Artificial Sequence
  Description of Artificial Sequence: Synthetic oligonucleotide
  Sense strand starting at position 466 of SEQ ID NO: 1889133
uugggauaauguuacaaag

SEQ ID NO: 2580393 - RNA, 19 nt, Artificial Sequence
  Description of Artificial Sequence: Synthetic oligonucleotide
  Antisense strand to SEQ ID NO: 2580392
cuuuguaacauuaucccaa

SEQ ID NO: 2580394 - RNA, 19 nt, Artificial Sequence
  Description of Artificial Sequence: Synthetic oligonucleotide
  Sense strand starting at position 468 of SEQ ID NO: 1889133
gggauaauguuacaaagca

SEQ ID NO: 2580395 - RNA, 19 nt, Artificial Sequence
  Description of Artificial Sequence: Synthetic oligonucleotide
  Antisense strand to SEQ ID NO: 2580394
ugcuuuguaacauuauccc

SEQ ID NO: 2580396 - RNA, 19 nt, Artificial Sequence
  Description of Artificial Sequence: Synthetic oligonucleotide
  Sense strand starting at position 620 of SEQ ID NO: 1889133
gagaccauugguugaauca

SEQ ID NO: 2580397 - RNA, 19 nt, Artificial Sequence
  Description of Artificial Sequence: Synthetic oligonucleotide
  Antisense strand to SEQ ID NO: 2580396
ugauucaaccaauggucuc

SEQ ID NO: 2580398 - RNA, 19 nt, Artificial Sequence
  Description of Artificial Sequence: Synthetic oligonucleotide
  Sense strand starting at position 756 of SEQ ID NO: 1889133
ccaguuacuucuucugcua

SEQ ID NO: 2580399 - RNA, 19 nt, Artificial Sequence
  Description of Artificial Sequence: Synthetic oligonucleotide
  Antisense strand to SEQ ID NO: 2580398
uagcagaagaaguaacugg

SEQ ID NO: 2580400 - RNA, 19 nt, Artificial Sequence
  Description of Artificial Sequence: Synthetic oligonucleotide
  Sense strand starting at position 759 of SEQ ID NO: 1889133
guuacuucuucugcuaucu

SEQ ID NO: 2580401 - RNA, 19 nt, Artificial Sequence
  Description of Artificial Sequence: Synthetic oligonucleotide
  Antisense strand to SEQ ID NO: 2580400
agauagcagaagaaguaac

SEQ ID NO: 2580402 - RNA, 19 nt, Artificial Sequence
  Description of Artificial Sequence: Synthetic oligonucleotide
  Sense strand starting at position 817 of SEQ ID NO: 1889133
uuacccuuuccguaaaugu

SEQ ID NO: 2580403 - RNA, 19 nt, Artificial Sequence
  Description of Artificial Sequence: Synthetic oligonucleotide
  Antisense strand to SEQ ID NO: 2580402
acauuuacggaaaggguaa

SEQ ID NO: 2580404 - RNA, 19 nt, Artificial Sequence
  Description of Artificial Sequence: Synthetic oligonucleotide
  Sense strand starting at position 899 of SEQ ID NO: 1889133
gaaggagucuuuccuucuu

SEQ ID NO: 2580405 - RNA, 19 nt, Artificial Sequence
  Description of Artificial Sequence: Synthetic oligonucleotide
  Antisense strand to SEQ ID NO: 2580404
aagaaggaaagacuccuuc

SEQ ID NO: 2580406 - RNA, 19 nt, Artificial Sequence
  Description of Artificial Sequence: Synthetic oligonucleotide
  Sense strand starting at position 901 of SEQ ID NO: 1889133
aggagucuuuccuucuugu

SEQ ID NO: 2580407 - RNA, 19 nt, Artificial Sequence
  Description of Artificial Sequence: Synthetic oligonucleotide
  Antisense strand to SEQ ID NO: 2580406
acaagaaggaaagacuccu

SEQ ID NO: 2580408 - RNA, 19 nt, Artificial Sequence
  Description of Artificial Sequence: Synthetic oligonucleotide
  Sense strand starting at position 942 of SEQ ID NO: 1889133
acaguuugucuacgcucua

SEQ ID NO: 2580409 - RNA, 19 nt, Artificial Sequence
  Description of Artificial Sequence: Synthetic oligonucleotide
  Antisense strand to SEQ ID NO: 2580408
uagagcguagacaaacugu

SEQ ID NO: 2580410 - RNA, 19 nt, Artificial Sequence
  Description of Artificial Sequence: Synthetic oligonucleotide
  Sense strand starting at position 1165 of SEQ ID NO: 1889133
acuacacuugcacguauaa

SEQ ID NO: 2580411 - RNA, 19 nt, Artificial Sequence
  Description of Artificial Sequence: Synthetic oligonucleotide
  Antisense strand to SEQ ID NO: 2580410
uuauacgugcaaguguagu

SEQ ID NO: 2580412 - RNA, 19 nt, Artificial Sequence
  Description of Artificial Sequence: Synthetic oligonucleotide
  Sense strand starting at position 1273 of SEQ ID NO: 1889133
agaacacaguuagaauauu

SEQ ID NO: 2580413 - RNA, 19 nt, Artificial Sequence
  Description of Artificial Sequence: Synthetic oligonucleotide
  Antisense strand to SEQ ID NO: 2580412
aauauucuaacuguguucu

SEQ ID NO: 2580414 - RNA, 19 nt, Artificial Sequence
  Description of Artificial Sequence: Synthetic oligonucleotide
  Sense strand starting at position 1449 of SEQ ID NO: 1889133
uggacucaucaagguacua

SEQ ID NO: 2580415 - RNA, 19 nt, Artificial Sequence
  Description of Artificial Sequence: Synthetic oligonucleotide
  Antisense strand to SEQ ID NO: 2580414
uaguaccuugaugagucca

SEQ ID NO: 2580416 - RNA, 19 nt, Artificial Sequence
  Description of Artificial Sequence: Synthetic oligonucleotide
  Sense strand starting at position 1523 of SEQ ID NO: 1889133
gguucuuaauacucaguca

SEQ ID NO: 2580417 - RNA, 19 nt, Artificial Sequence
  Description of Artificial Sequence: Synthetic oligonucleotide
  Antisense strand to SEQ ID NO: 2580416
ugacugaguauuaagaacc

SEQ ID NO: 2580418 - RNA, 19 nt, Artificial Sequence
  Description of Artificial Sequence: Synthetic oligonucleotide
  Sense strand starting at position 1627 of SEQ ID NO: 1889133
gguuauccuuuccauagag

SEQ ID NO: 2580419 - RNA, 19 nt, Artificial Sequence
  Description of Artificial Sequence: Synthetic oligonucleotide
  Antisense strand to SEQ ID NO: 2580418
cucuauggaaaggauaacc

SEQ ID NO: 2580420 - RNA, 19 nt, Artificial Sequence
  Description of Artificial Sequence: Synthetic oligonucleotide
  Sense strand starting at position 1645 of SEQ ID NO: 1889133
gccuuaaccuaguacuaug

SEQ ID NO: 2580421 - RNA, 19 nt, Artificial Sequence
  Description of Artificial Sequence: Synthetic oligonucleotide
  Antisense strand to SEQ ID NO: 2580420
cauaguacuagguuaaggc

SEQ ID NO: 2580422 - RNA, 19 nt, Artificial Sequence
  Description of Artificial Sequence: Synthetic oligonucleotide
  Sense strand starting at position 1648 of SEQ ID NO: 1889133
uuaaccuaguacuaugaga

SEQ ID NO: 2580423 - RNA, 19 nt, Artificial Sequence
  Description of Artificial Sequence: Synthetic oligonucleotide
  Antisense strand to SEQ ID NO: 2580422
ucucauaguacuagguuaa

SEQ ID NO: 2580424 - RNA, 19 nt, Artificial Sequence
  Description of Artificial Sequence: Synthetic oligonucleotide
  Sense strand starting at position 1932 of SEQ ID NO: 1889133
ucucauuggucucucuauu

SEQ ID NO: 2580425 - RNA, 19 nt, Artificial Sequence
  Description of Artificial Sequence: Synthetic oligonucleotide
  Antisense strand to SEQ ID NO: 2580424
aauagagagaccaaugaga

SEQ ID NO: 2580426 - RNA, 19 nt, Artificial Sequence
  Description of Artificial Sequence: Synthetic oligonucleotide
  Sense strand starting at position 1944 of SEQ ID NO: 1889133
cucuauugaggccacaaau

SEQ ID NO: 2580427 - RNA, 19 nt, Artificial Sequence
  Description of Artificial Sequence: Synthetic oligonucleotide
  Antisense strand to SEQ ID NO: 2580426
auuuguggccucaauagag

SEQ ID NO: 2580428 - RNA, 19 nt, Artificial Sequence
  Description of Artificial Sequence: Synthetic oligonucleotide
  Sense strand starting at position 1973 of SEQ ID NO: 1889133
ccaggaugaucugccucua

SEQ ID NO: 2580429 - RNA, 19 nt, Artificial Sequence
  Description of Artificial Sequence: Synthetic oligonucleotide
  Antisense strand to SEQ ID NO: 2580428
uagaggcagaucauccugg

SEQ ID NO: 2580430 - RNA, 19 nt, Artificial Sequence
  Description of Artificial Sequence: Synthetic oligonucleotide
  Sense strand starting at position 2060 of SEQ ID NO: 1889133
auuacaaacugugcugaaa

SEQ ID NO: 2580431 - RNA, 19 nt, Artificial Sequence
  Description of Artificial Sequence: Synthetic oligonucleotide
  Antisense strand to SEQ ID NO: 2580430
uuucagcacaguuuguaau

SEQ ID NO: 2580432 - RNA, 19 nt, Artificial Sequence
  Description of Artificial Sequence: Synthetic oligonucleotide
  Sense strand starting at position 2308 of SEQ ID NO: 1889133
acugucuauuuaugaggua

SEQ ID NO: 2580433 - RNA, 19 nt, Artificial Sequence
  Description of Artificial Sequence: Synthetic oligonucleotide
  Antisense strand to SEQ ID NO: 2580432
uaccucauaaauagacagu

SEQ ID NO: 2580434 - RNA, 19 nt, Artificial Sequence
  Description of Artificial Sequence: Synthetic oligonucleotide
  Sense strand starting at position 2311 of SEQ ID NO: 1889133
gucuauuuaugagguacag

SEQ ID NO: 2580435 - RNA, 19 nt, Artificial Sequence
  Description of Artificial Sequence: Synthetic oligonucleotide
  Antisense strand to SEQ ID NO: 2580434
cuguaccucauaaauagac

SEQ ID NO: 2580436 - RNA, 19 nt, Artificial Sequence
  Description of Artificial Sequence: Synthetic oligonucleotide
  Sense strand starting at position 2349 of SEQ ID NO: 1889133
ucuuucuugagaugugugu

SEQ ID NO: 2580437 - RNA, 19 nt, Artificial Sequence
  Description of Artificial Sequence: Synthetic oligonucleotide
  Antisense strand to SEQ ID NO: 2580436
acacacaucucaagaaaga

SEQ ID NO: 2580438 - RNA, 19 nt, Artificial Sequence
  Description of Artificial Sequence: Synthetic oligonucleotide
  Sense strand starting at position 2362 of SEQ ID NO: 1889133
gugugucuccuguugccaa

SEQ ID NO: 2580439 - RNA, 19 nt, Artificial Sequence
  Description of Artificial Sequence: Synthetic oligonucleotide
  Antisense strand to SEQ ID NO: 2580438
uuggcaacaggagacacac

SEQ ID NO: 2580440 - RNA, 19 nt, Artificial Sequence
  Description of Artificial Sequence: Synthetic oligonucleotide
  Sense strand starting at position 2692 of SEQ ID NO: 1889133
acaaucuucuagugauuug

SEQ ID NO: 2580441 - RNA, 19 nt, Artificial Sequence
  Description of Artificial Sequence: Synthetic oligonucleotide
  Antisense strand to SEQ ID NO: 2580440
caaaucacuagaagauugu

SEQ ID NO: 2580442 - RNA, 19 nt, Artificial Sequence
  Description of Artificial Sequence: Synthetic oligonucleotide
  Sense strand starting at position 2796 of SEQ ID NO: 1889133
uguaauaccuguuugugga

SEQ ID NO: 2580443 - RNA, 19 nt, Artificial Sequence
  Description of Artificial Sequence: Synthetic oligonucleotide
  Antisense strand to SEQ ID NO: 2580442
uccacaaacagguauuaca

SEQ ID NO: 2580444 - RNA, 19 nt, Artificial Sequence
  Description of Artificial Sequence: Synthetic oligonucleotide
  Sense strand starting at position 2799 of SEQ ID NO: 1889133
aauaccuguuuguggagaa

SEQ ID NO: 2580445 - RNA, 19 nt, Artificial Sequence
  Description of Artificial Sequence: Synthetic oligonucleotide
  Antisense strand to SEQ ID NO: 2580444
uucuccacaaacagguauu

SEQ ID NO: 2580446 - RNA, 19 nt, Artificial Sequence
  Description of Artificial Sequence: Synthetic oligonucleotide
  Sense strand starting at position 2919 of SEQ ID NO: 1889133
ccaccuguccucugucaca

SEQ ID NO: 2580447 - RNA, 19 nt, Artificial Sequence
  Description of Artificial Sequence: Synthetic oligonucleotide
  Antisense strand to SEQ ID NO: 2580446
ugugacagaggacaggugg

SEQ ID NO: 2580448 - RNA, 19 nt, Artificial Sequence
  Description of Artificial Sequence: Synthetic oligonucleotide
  Sense strand starting at position 3033 of SEQ ID NO: 1889133
cugugcaacccuugucuga

SEQ ID NO: 2580449 - RNA, 19 nt, Artificial Sequence
  Description of Artificial Sequence: Synthetic oligonucleotide
  Antisense strand to SEQ ID NO: 2580448
ucagacaaggguugcacag

SEQ ID NO: 2580450 - RNA, 19 nt, Artificial Sequence
  Description of Artificial Sequence: Synthetic oligonucleotide
  Sense strand starting at position 3182 of SEQ ID NO: 1889133
ggauuacacgaguaaguca

SEQ ID NO: 2580451 - RNA, 19 nt, Artificial Sequence
  Description of Artificial Sequence: Synthetic oligonucleotide
  Antisense strand to SEQ ID NO: 2580450
ugacuuacucguguaaucc

SEQ ID NO: 2580452 - RNA, 19 nt, Artificial Sequence
  Description of Artificial Sequence: Synthetic oligonucleotide
  Sense strand starting at position 3190 of SEQ ID NO: 1889133
cgaguaagucagugugcca

SEQ ID NO: 2580453 - RNA, 19 nt, Artificial Sequence
  Description of Artificial Sequence: Synthetic oligonucleotide
  Antisense strand to SEQ ID NO: 2580452
uggcacacugacuuacucg

SEQ ID NO: 2580454 - RNA, 19 nt, Artificial Sequence
  Description of Artificial Sequence: Synthetic oligonucleotide
  Sense strand starting at position 3286 of SEQ ID NO: 1889133
accgauuauucgguuuaaa

SEQ ID NO: 2580455 - RNA, 19 nt, Artificial Sequence
  Description of Artificial Sequence: Synthetic oligonucleotide
  Antisense strand to SEQ ID NO: 2580454
uuuaaaccgaauaaucggu

SEQ ID NO: 2580456 - RNA, 19 nt, Artificial Sequence
  Description of Artificial Sequence: Synthetic oligonucleotide
  Sense strand starting at position 3306 of SEQ ID NO: 1889133
uauuuacggugccaaagau

SEQ ID NO: 2580457 - RNA, 19 nt, Artificial Sequence
  Description of Artificial Sequence: Synthetic oligonucleotide
  Antisense strand to SEQ ID NO: 2580456
aucuuuggcaccguaaaua

SEQ ID NO: 2580458 - RNA, 19 nt, Artificial Sequence
  Description of Artificial Sequence: Synthetic oligonucleotide
  Sense strand starting at position 3625 of SEQ ID NO: 1889133
ccacaacuagucggacaua

SEQ ID NO: 2580459 - RNA, 19 nt, Artificial Sequence
  Description of Artificial Sequence: Synthetic oligonucleotide
  Antisense strand to SEQ ID NO: 2580458
uauguccgacuaguugugg

SEQ ID NO: 2580460 - RNA, 19 nt, Artificial Sequence
  Description of Artificial Sequence: Synthetic oligonucleotide
  Sense strand starting at position 3626 of SEQ ID NO: 1889133
cacaacuagucggacauau

SEQ ID NO: 2580461 - RNA, 19 nt, Artificial Sequence
  Description of Artificial Sequence: Synthetic oligonucleotide
  Antisense strand to SEQ ID NO: 2580460
auauguccgacuaguugug

SEQ ID NO: 2580462 - RNA, 19 nt, Artificial Sequence
  Description of Artificial Sequence: Synthetic oligonucleotide
  Sense strand starting at position 3628 of SEQ ID NO: 1889133
caacuagucggacauauua

SEQ ID NO: 2580463 - RNA, 19 nt, Artificial Sequence
  Description of Artificial Sequence: Synthetic oligonucleotide
  Antisense strand to SEQ ID NO: 2580462
uaauauguccgacuaguug

SEQ ID NO: 2580464 - RNA, 19 nt, Artificial Sequence
  Description of Artificial Sequence: Synthetic oligonucleotide
  Sense strand starting at position 3636 of SEQ ID NO: 1889133
cggacauauuaggcaguua

SEQ ID NO: 2580465 - RNA, 19 nt, Artificial Sequence
  Description of Artificial Sequence: Synthetic oligonucleotide
  Antisense strand to SEQ ID NO: 2580464
uaacugccuaauauguccg

SEQ ID NO: 2580466 - RNA, 19 nt, Artificial Sequence
  Description of Artificial Sequence: Synthetic oligonucleotide
  Sense strand starting at position 3647 of SEQ ID NO: 1889133
ggcaguuaaauguagaauc

SEQ ID NO: 2580467 - RNA, 19 nt, Artificial Sequence
  Description of Artificial Sequence: Synthetic oligonucleotide
  Antisense strand to SEQ ID NO: 2580466
gauucuacauuuaacugcc

SEQ ID NO: 2580468 - RNA, 19 nt, Artificial Sequence
  Description of Artificial Sequence: Synthetic oligonucleotide
  Sense strand starting at position 3895 of SEQ ID NO: 1889133
gcccucaggccguauguau

SEQ ID NO: 2580469 - RNA, 19 nt, Artificial Sequence
  Description of Artificial Sequence: Synthetic oligonucleotide
  Antisense strand to SEQ ID NO: 2580468
auacauacggccugagggc

SEQ ID NO: 2580470 - RNA, 19 nt, Artificial Sequence
  Description of Artificial Sequence: Synthetic oligonucleotide
  Sense strand starting at position 3902 of SEQ ID NO: 1889133
ggccguauguauccagcuu

SEQ ID NO: 2580471 - RNA, 19 nt, Artificial Sequence
  Description of Artificial Sequence: Synthetic oligonucleotide
  Antisense strand to SEQ ID NO: 2580470
aagcuggauacauacggcc

SEQ ID NO: 2580472 - RNA, 19 nt, Artificial Sequence
  Description of Artificial Sequence: Synthetic oligonucleotide
  Sense strand starting at position 78 of SEQ ID NO: 1889134
uugcuauauuuguuugcua

SEQ ID NO: 2580473 - RNA, 19 nt, Artificial Sequence
  Description of Artificial Sequence: Synthetic oligonucleotide
  Antisense strand to SEQ ID NO: 2580472
uagcaaacaaauauagcaa

SEQ ID NO: 2580474 - RNA, 19 nt, Artificial Sequence
  Description of Artificial Sequence: Synthetic oligonucleotide
  Sense strand starting at position 79 of SEQ ID NO: 1889134
ugcuauauuuguuugcuau

SEQ ID NO: 2580475 - RNA, 19 nt, Artificial Sequence
  Description of Artificial Sequence: Synthetic oligonucleotide
  Antisense strand to SEQ ID NO: 2580474
auagcaaacaaauauagca

SEQ ID NO: 2580476 - RNA, 19 nt, Artificial Sequence
  Description of Artificial Sequence: Synthetic oligonucleotide
  Sense strand starting at position 80 of SEQ ID NO: 1889134
gcuauauuuguuugcuaua

SEQ ID NO: 2580477 - RNA, 19 nt, Artificial Sequence
  Description of Artificial Sequence: Synthetic oligonucleotide
  Antisense strand to SEQ ID NO: 2580476
uauagcaaacaaauauagc

SEQ ID NO: 2580478 - RNA, 19 nt, Artificial Sequence
  Description of Artificial Sequence: Synthetic oligonucleotide
  Sense strand starting at position 81 of SEQ ID NO: 1889134
cuauauuuguuugcuauag

SEQ ID NO: 2580479 - RNA, 19 nt, Artificial Sequence
  Description of Artificial Sequence: Synthetic oligonucleotide
  Antisense strand to SEQ ID NO: 2580478
cuauagcaaacaaauauag

SEQ ID NO: 2580480 - RNA, 19 nt, Artificial Sequence
  Description of Artificial Sequence: Synthetic oligonucleotide
  Sense strand starting at position 287 of SEQ ID NO: 1889134
ugguuucguucuccugaca

SEQ ID NO: 2580481 - RNA, 19 nt, Artificial Sequence
  Description of Artificial Sequence: Synthetic oligonucleotide
  Antisense strand to SEQ ID NO: 2580480
ugucaggagaacgaaacca

SEQ ID NO: 2580482 - RNA, 19 nt, Artificial Sequence
  Description of Artificial Sequence: Synthetic oligonucleotide
  Sense strand starting at position 290 of SEQ ID NO: 1889134
uuucguucuccugacauca

SEQ ID NO: 2580483 - RNA, 19 nt, Artificial Sequence
  Description of Artificial Sequence: Synthetic oligonucleotide
  Antisense strand to SEQ ID NO: 2580482
ugaugucaggagaacgaaa

SEQ ID NO: 2580484 - RNA, 19 nt, Artificial Sequence
  Description of Artificial Sequence: Synthetic oligonucleotide
  Sense strand starting at position 419 of SEQ ID NO: 1889134
agacauguccgacaguuaa

SEQ ID NO: 2580485 - RNA, 19 nt, Artificial Sequence
  Description of Artificial Sequence: Synthetic oligonucleotide
  Antisense strand to SEQ ID NO: 2580484
uuaacugucggacaugucu

SEQ ID NO: 2580486 - RNA, 19 nt, Artificial Sequence
  Description of Artificial Sequence: Synthetic oligonucleotide
  Sense strand starting at position 530 of SEQ ID NO: 1889134
uuaggaucauguuauaaag

SEQ ID NO: 2580487 - RNA, 19 nt, Artificial Sequence
  Description of Artificial Sequence: Synthetic oligonucleotide
  Antisense strand to SEQ ID NO: 2580486
cuuuauaacaugauccuaa

SEQ ID NO: 2580488 - RNA, 19 nt, Artificial Sequence
  Description of Artificial Sequence: Synthetic oligonucleotide
  Sense strand starting at position 532 of SEQ ID NO: 1889134
aggaucauguuauaaagca

SEQ ID NO: 2580489 - RNA, 19 nt, Artificial Sequence
  Description of Artificial Sequence: Synthetic oligonucleotide
  Antisense strand to SEQ ID NO: 2580488
ugcuuuauaacaugauccu

SEQ ID NO: 2580490 - RNA, 19 nt, Artificial Sequence
  Description of Artificial Sequence: Synthetic oligonucleotide
  Sense strand starting at position 683 of SEQ ID NO: 1889134
gagaccaauguuuggauca

SEQ ID NO: 2580491 - RNA, 19 nt, Artificial Sequence
  Description of Artificial Sequence: Synthetic oligonucleotide
  Antisense strand to SEQ ID NO: 2580490
ugauccaaacauuggucuc

SEQ ID NO: 2580492 - RNA, 19 nt, Artificial Sequence
  Description of Artificial Sequence: Synthetic oligonucleotide
  Sense strand starting at position 685 of SEQ ID NO: 1889134
gaccaauguuuggaucaaa

SEQ ID NO: 2580493 - RNA, 19 nt, Artificial Sequence
  Description of Artificial Sequence: Synthetic oligonucleotide
  Antisense strand to SEQ ID NO: 2580492
uuugauccaaacauugguc

SEQ ID NO: 2580494 - RNA, 19 nt, Artificial Sequence
  Description of Artificial Sequence: Synthetic oligonucleotide
  Sense strand starting at position 827 of SEQ ID NO: 1889134
cuucuuguguuauccaacu

SEQ ID NO: 2580495 - RNA, 19 nt, Artificial Sequence
  Description of Artificial Sequence: Synthetic oligonucleotide
  Antisense strand to SEQ ID NO: 2580494
aguuggauaacacaagaag

SEQ ID NO: 2580496 - RNA, 19 nt, Artificial Sequence
  Description of Artificial Sequence: Synthetic oligonucleotide
  Sense strand starting at position 951 of SEQ ID NO: 1889134
agagaaucuuuccuucuug

SEQ ID NO: 2580497 - RNA, 19 nt, Artificial Sequence
  Description of Artificial Sequence: Synthetic oligonucleotide
  Antisense strand to SEQ ID NO: 2580496
caagaaggaaagauucucu

SEQ ID NO: 2580498 - RNA, 19 nt, Artificial Sequence
  Description of Artificial Sequence: Synthetic oligonucleotide
  Sense strand starting at position 1000 of SEQ ID NO: 1889134
uucugugcucuagaaguau

SEQ ID NO: 2580499 - RNA, 19 nt, Artificial Sequence
  Description of Artificial Sequence: Synthetic oligonucleotide
  Antisense strand to SEQ ID NO: 2580498
auacuucuagagcacagaa

SEQ ID NO: 2580500 - RNA, 19 nt, Artificial Sequence
  Description of Artificial Sequence: Synthetic oligonucleotide
  Sense strand starting at position 1040 of SEQ ID NO: 1889134
gcauuaauggcauguaaua

SEQ ID NO: 2580501 - RNA, 19 nt, Artificial Sequence
  Description of Artificial Sequence: Synthetic oligonucleotide
  Antisense strand to SEQ ID NO: 2580500
uauuacaugccauuaaugc

SEQ ID NO: 2580502 - RNA, 19 nt, Artificial Sequence
  Description of Artificial Sequence: Synthetic oligonucleotide
  Sense strand starting at position 1216 of SEQ ID NO: 1889134
acuacaguugaauguauau

SEQ ID NO: 2580503 - RNA, 19 nt, Artificial Sequence
  Description of Artificial Sequence: Synthetic oligonucleotide
  Antisense strand to SEQ ID NO: 2580502
auauacauucaacuguagu

SEQ ID NO: 2580504 - RNA, 19 nt, Artificial Sequence
  Description of Artificial Sequence: Synthetic oligonucleotide
  Sense strand starting at position 1222 of SEQ ID NO: 1889134
guugaauguauauggcaca

SEQ ID NO: 2580505 - RNA, 19 nt, Artificial Sequence
  Description of Artificial Sequence: Synthetic oligonucleotide
  Antisense strand to SEQ ID NO: 2580504
ugugccauauacauucaac

SEQ ID NO: 2580506 - RNA, 19 nt, Artificial Sequence
  Description of Artificial Sequence: Synthetic oligonucleotide
  Sense strand starting at position 1324 of SEQ ID NO: 1889134
agaagagaguuagaauauu

SEQ ID NO: 2580507 - RNA, 19 nt, Artificial Sequence
  Description of Artificial Sequence: Synthetic oligonucleotide
  Antisense strand to SEQ ID NO: 2580506
aauauucuaacucucuucu

SEQ ID NO: 2580508 - RNA, 19 nt, Artificial Sequence
  Description of Artificial Sequence: Synthetic oligonucleotide
  Sense strand starting at position 1377 of SEQ ID NO: 1889134
uuggcagcauucuuaacau

SEQ ID NO: 2580509 - RNA, 19 nt, Artificial Sequence
  Description of Artificial Sequence: Synthetic oligonucleotide
  Antisense strand to SEQ ID NO: 2580508
auguuaagaaugcugccaa

SEQ ID NO: 2580510 - RNA, 19 nt, Artificial Sequence
  Description of Artificial Sequence: Synthetic oligonucleotide
  Sense strand starting at position 1493 of SEQ ID NO: 1889134
auauaauggacgcgucaag

SEQ ID NO: 2580511 - RNA, 19 nt, Artificial Sequence
  Description of Artificial Sequence: Synthetic oligonucleotide
  Antisense strand to SEQ ID NO: 2580510
cuugacgcguccauuauau

SEQ ID NO: 2580512 - RNA, 19 nt, Artificial Sequence
  Description of Artificial Sequence: Synthetic oligonucleotide
  Sense strand starting at position 1562 of SEQ ID NO: 1889134
ucacuaguauuauacuuga

SEQ ID NO: 2580513 - RNA, 19 nt, Artificial Sequence
  Description of Artificial Sequence: Synthetic oligonucleotide
  Antisense strand to SEQ ID NO: 2580512
ucaaguauaauacuaguga

SEQ ID NO: 2580514 - RNA, 19 nt, Artificial Sequence
  Description of Artificial Sequence: Synthetic oligonucleotide
  Sense strand starting at position 1565 of SEQ ID NO: 1889134
cuaguauuauacuugauac

SEQ ID NO: 2580515 - RNA, 19 nt, Artificial Sequence
  Description of Artificial Sequence: Synthetic oligonucleotide
  Antisense strand to SEQ ID NO: 2580514
guaucaaguauaauacuag

SEQ ID NO: 2580516 - RNA, 19 nt, Artificial Sequence
  Description of Artificial Sequence: Synthetic oligonucleotide
  Sense strand starting at position 1591 of SEQ ID NO: 1889134
cccuauaguuagccuauuu

SEQ ID NO: 2580517 - RNA, 19 nt, Artificial Sequence
  Description of Artificial Sequence: Synthetic oligonucleotide
  Antisense strand to SEQ ID NO: 2580516
aaauaggcuaacuauaggg

SEQ ID NO: 2580518 - RNA, 19 nt, Artificial Sequence
  Description of Artificial Sequence: Synthetic oligonucleotide
  Sense strand starting at position 1611 of SEQ ID NO: 1889134
guuccaguuuguucccuaa

SEQ ID NO: 2580519 - RNA, 19 nt, Artificial Sequence
  Description of Artificial Sequence: Synthetic oligonucleotide
  Antisense strand to SEQ ID NO: 2580518
uuagggaacaaacuggaac

SEQ ID NO: 2580520 - RNA, 19 nt, Artificial Sequence
  Description of Artificial Sequence: Synthetic oligonucleotide
  Sense strand starting at position 1674 of SEQ ID NO: 1889134
aggugauccuuaccacaga

SEQ ID NO: 2580521 - RNA, 19 nt, Artificial Sequence
  Description of Artificial Sequence: Synthetic oligonucleotide
  Antisense strand to SEQ ID NO: 2580520
ucugugguaaggaucaccu

SEQ ID NO: 2580522 - RNA, 19 nt, Artificial Sequence
  Description of Artificial Sequence: Synthetic oligonucleotide
  Sense strand starting at position 1675 of SEQ ID NO: 1889134
ggugauccuuaccacagau

SEQ ID NO: 2580523 - RNA, 19 nt, Artificial Sequence
  Description of Artificial Sequence: Synthetic oligonucleotide
  Antisense strand to SEQ ID NO: 2580522
aucugugguaaggaucacc

SEQ ID NO: 2580524 - RNA, 19 nt, Artificial Sequence
  Description of Artificial Sequence: Synthetic oligonucleotide
  Sense strand starting at position 1925 of SEQ ID NO: 1889134
gggaccauguuucucaaau

SEQ ID NO: 2580525 - RNA, 19 nt, Artificial Sequence
  Description of Artificial Sequence: Synthetic oligonucleotide
  Antisense strand to SEQ ID NO: 2580524
auuugagaaacaugguccc

SEQ ID NO: 2580526 - RNA, 19 nt, Artificial Sequence
  Description of Artificial Sequence: Synthetic oligonucleotide
  Sense strand starting at position 1926 of SEQ ID NO: 1889134
ggaccauguuucucaaaua

SEQ ID NO: 2580527 - RNA, 19 nt, Artificial Sequence
  Description of Artificial Sequence: Synthetic oligonucleotide
  Antisense strand to SEQ ID NO: 2580526
uauuugagaaacauggucc

SEQ ID NO: 2580528 - RNA, 19 nt, Artificial Sequence
  Description of Artificial Sequence: Synthetic oligonucleotide
  Sense strand starting at position 2001 of SEQ ID NO: 1889134
cccggaugaucugcuucua

SEQ ID NO: 2580529 - RNA, 19 nt, Artificial Sequence
  Description of Artificial Sequence: Synthetic oligonucleotide
  Antisense strand to SEQ ID NO: 2580528
uagaagcagaucauccggg

SEQ ID NO: 2580530 - RNA, 19 nt, Artificial Sequence
  Description of Artificial Sequence: Synthetic oligonucleotide
  Sense strand starting at position 2026 of SEQ ID NO: 1889134
ugcugcaaauggucaaaga

SEQ ID NO: 2580531 - RNA, 19 nt, Artificial Sequence
  Description of Artificial Sequence: Synthetic oligonucleotide
  Antisense strand to SEQ ID NO: 2580530
ucuuugaccauuugcagca

SEQ ID NO: 2580532 - RNA, 19 nt, Artificial Sequence
  Description of Artificial Sequence: Synthetic oligonucleotide
  Sense strand starting at position 2027 of SEQ ID NO: 1889134
gcugcaaauggucaaagaa

SEQ ID NO: 2580533 - RNA, 19 nt, Artificial Sequence
  Description of Artificial Sequence: Synthetic oligonucleotide
  Antisense strand to SEQ ID NO: 2580532
uucuuugaccauuugcagc

SEQ ID NO: 2580534 - RNA, 19 nt, Artificial Sequence
  Description of Artificial Sequence: Synthetic oligonucleotide
  Sense strand starting at position 2422 of SEQ ID NO: 1889134
gcaaccuagucauccgaca

SEQ ID NO: 2580535 - RNA, 19 nt, Artificial Sequence
  Description of Artificial Sequence: Synthetic oligonucleotide
  Antisense strand to SEQ ID NO: 2580534
ugucggaugacuagguugc

SEQ ID NO: 2580536 - RNA, 19 nt, Artificial Sequence
  Description of Artificial Sequence: Synthetic oligonucleotide
  Sense strand starting at position 2644 of SEQ ID NO: 1889134
acaccauuagaauggcaau

SEQ ID NO: 2580537 - RNA, 19 nt, Artificial Sequence
  Description of Artificial Sequence: Synthetic oligonucleotide
  Antisense strand to SEQ ID NO: 2580536
auugccauucuaauggugu

SEQ ID NO: 2580538 - RNA, 19 nt, Artificial Sequence
  Description of Artificial Sequence: Synthetic oligonucleotide
  Sense strand starting at position 3412 of SEQ ID NO: 1889134
acagauaaaugcugcauuu

SEQ ID NO: 2580539 - RNA, 19 nt, Artificial Sequence
  Description of Artificial Sequence: Synthetic oligonucleotide
  Antisense strand to SEQ ID NO: 2580538
aaaugcagcauuuaucugu

SEQ ID NO: 2580540 - RNA, 19 nt, Artificial Sequence
  Description of Artificial Sequence: Synthetic oligonucleotide
  Sense strand starting at position 3494 of SEQ ID NO: 1889134
uaaguuguaaugugaagga

SEQ ID NO: 2580541 - RNA, 19 nt, Artificial Sequence
  Description of Artificial Sequence: Synthetic oligonucleotide
  Antisense strand to SEQ ID NO: 2580540
uccuucacauuacaacuua

SEQ ID NO: 2580542 - RNA, 19 nt, Artificial Sequence
  Description of Artificial Sequence: Synthetic oligonucleotide
  Sense strand starting at position 3497 of SEQ ID NO: 1889134
guuguaaugugaaggagug

SEQ ID NO: 2580543 - RNA, 19 nt, Artificial Sequence
  Description of Artificial Sequence: Synthetic oligonucleotide
  Antisense strand to SEQ ID NO: 2580542
cacuccuucacauuacaac

SEQ ID NO: 2580544 - RNA, 19 nt, Artificial Sequence
  Description of Artificial Sequence: Synthetic oligonucleotide
  Sense strand starting at position 3795 of SEQ ID NO: 1889134
gugauuugcuggcuuggga

SEQ ID NO: 2580545 - RNA, 19 nt, Artificial Sequence
  Description of Artificial Sequence: Synthetic oligonucleotide
  Antisense strand to SEQ ID NO: 2580544
ucccaagccagcaaaucac

SEQ ID NO: 2580546 - RNA, 19 nt, Artificial Sequence
  Description of Artificial Sequence: Synthetic oligonucleotide
  Sense strand starting at position 3803 of SEQ ID NO: 1889134
cuggcuugggacuauuaga

SEQ ID NO: 2580547 - RNA, 19 nt, Artificial Sequence
  Description of Artificial Sequence: Synthetic oligonucleotide
  Antisense strand to SEQ ID NO: 2580546
ucuaauagucccaagccag

SEQ ID NO: 2580548 - RNA, 19 nt, Artificial Sequence
  Description of Artificial Sequence: Synthetic oligonucleotide
  Sense strand starting at position 3808 of SEQ ID NO: 1889134
uugggacuauuagagugau

SEQ ID NO: 2580549 - RNA, 19 nt, Artificial Sequence
  Description of Artificial Sequence: Synthetic oligonucleotide
  Antisense strand to SEQ ID NO: 2580548
aucacucuaauagucccaa

SEQ ID NO: 2580550 - RNA, 19 nt, Artificial Sequence
  Description of Artificial Sequence: Synthetic oligonucleotide
  Sense strand starting at position 3959 of SEQ ID NO: 1889134
ggucaaggaucccugaauc

SEQ ID NO: 2580551 - RNA, 19 nt, Artificial Sequence
  Description of Artificial Sequence: Synthetic oligonucleotide
  Antisense strand to SEQ ID NO: 2580550
gauucagggauccuugacc

SEQ ID NO: 2580552 - RNA, 19 nt, Artificial Sequence
  Description of Artificial Sequence: Synthetic oligonucleotide
  Sense strand starting at position 188 of SEQ ID NO: 1889135
ggacaaaugcugcauuaua

SEQ ID NO: 2580553 - RNA, 19 nt, Artificial Sequence
  Description of Artificial Sequence: Synthetic oligonucleotide
  Antisense strand to SEQ ID NO: 2580552
uauaaugcagcauuugucc

SEQ ID NO: 2580554 - RNA, 19 nt, Artificial Sequence
  Description of Artificial Sequence: Synthetic oligonucleotide
  Sense strand starting at position 199 of SEQ ID NO: 1889135
gcauuauaauccguaccug

SEQ ID NO: 2580555 - RNA, 19 nt, Artificial Sequence
  Description of Artificial Sequence: Synthetic oligonucleotide
  Antisense strand to SEQ ID NO: 2580554
cagguacggauuauaaugc

SEQ ID NO: 2580556 - RNA, 19 nt, Artificial Sequence
  Description of Artificial Sequence: Synthetic oligonucleotide
  Sense strand starting at position 268 of SEQ ID NO: 1889135
uaaguuguaaugugaaggu

SEQ ID NO: 2580557 - RNA, 19 nt, Artificial Sequence
  Description of Artificial Sequence: Synthetic oligonucleotide
  Antisense strand to SEQ ID NO: 2580556
accuucacauuacaacuua

SEQ ID NO: 2580558 - RNA, 19 nt, Artificial Sequence
  Description of Artificial Sequence: Synthetic oligonucleotide
  Sense strand starting at position 316 of SEQ ID NO: 1889135
acuauacauuuaugaggua

SEQ ID NO: 2580559 - RNA, 19 nt, Artificial Sequence
  Description of Artificial Sequence: Synthetic oligonucleotide
  Antisense strand to SEQ ID NO: 2580558
uaccucauaaauguauagu

SEQ ID NO: 2580560 - RNA, 19 nt, Artificial Sequence
  Description of Artificial Sequence: Synthetic oligonucleotide
  Sense strand starting at position 479 of SEQ ID NO: 1889135
uuaccacagcuguguaauu

SEQ ID NO: 2580561 - RNA, 19 nt, Artificial Sequence
  Description of Artificial Sequence: Synthetic oligonucleotide
  Antisense strand to SEQ ID NO: 2580560
aauuacacagcugugguaa

SEQ ID NO: 2580562 - RNA, 19 nt, Artificial Sequence
  Description of Artificial Sequence: Synthetic oligonucleotide
  Sense strand starting at position 531 of SEQ ID NO: 1889135
ugugaauagacacggguuu

SEQ ID NO: 2580563 - RNA, 19 nt, Artificial Sequence
  Description of Artificial Sequence: Synthetic oligonucleotide
  Antisense strand to SEQ ID NO: 2580562
aaacccgugucuauucaca

SEQ ID NO: 2580564 - RNA, 19 nt, Artificial Sequence
  Description of Artificial Sequence: Synthetic oligonucleotide
  Sense strand starting at position 588 of SEQ ID NO: 1889135
aagugaucugccggcuuag

SEQ ID NO: 2580565 - RNA, 19 nt, Artificial Sequence
  Description of Artificial Sequence: Synthetic oligonucleotide
  Antisense strand to SEQ ID NO: 2580564
cuaagccggcagaucacuu

SEQ ID NO: 2580566 - RNA, 19 nt, Artificial Sequence
  Description of Artificial Sequence: Synthetic oligonucleotide
  Sense strand starting at position 649 of SEQ ID NO: 1889135
cagcgagauacgcggauaa

SEQ ID NO: 2580567 - RNA, 19 nt, Artificial Sequence
  Description of Artificial Sequence: Synthetic oligonucleotide
  Antisense strand to SEQ ID NO: 2580566
uuauccgcguaucucgcug

SEQ ID NO: 2580568 - RNA, 19 nt, Artificial Sequence
  Description of Artificial Sequence: Synthetic oligonucleotide
  Sense strand starting at position 1067 of SEQ ID NO: 1889135
gcaacccuugucugaggaa

SEQ ID NO: 2580569 - RNA, 19 nt, Artificial Sequence
  Description of Artificial Sequence: Synthetic oligonucleotide
  Antisense strand to SEQ ID NO: 2580568
uuccucagacaaggguugc

SEQ ID NO: 2580570 - RNA, 19 nt, Artificial Sequence
  Description of Artificial Sequence: Synthetic oligonucleotide
  Sense strand starting at position 1068 of SEQ ID NO: 1889135
caacccuugucugaggaaa

SEQ ID NO: 2580571 - RNA, 19 nt, Artificial Sequence
  Description of Artificial Sequence: Synthetic oligonucleotide
  Antisense strand to SEQ ID NO: 2580570
uuuccucagacaaggguug

SEQ ID NO: 2580572 - RNA, 19 nt, Artificial Sequence
  Description of Artificial Sequence: Synthetic oligonucleotide
  Sense strand starting at position 1130 of SEQ ID NO: 1889135
gaaagaguccauuacguua

SEQ ID NO: 2580573 - RNA, 19 nt, Artificial Sequence
  Description of Artificial Sequence: Synthetic oligonucleotide
  Antisense strand to SEQ ID NO: 2580572
uaacguaauggacucuuuc

SEQ ID NO: 2580574 - RNA, 19 nt, Artificial Sequence
  Description of Artificial Sequence: Synthetic oligonucleotide
  Sense strand starting at position 1333 of SEQ ID NO: 1889135
uauuuacggugccaaacau

SEQ ID NO: 2580575 - RNA, 19 nt, Artificial Sequence
  Description of Artificial Sequence: Synthetic oligonucleotide
  Antisense strand to SEQ ID NO: 2580574
auguuuggcaccguaaaua

SEQ ID NO: 2580576 - RNA, 19 nt, Artificial Sequence
  Description of Artificial Sequence: Synthetic oligonucleotide
  Sense strand starting at position 1393 of SEQ ID NO: 1889135
ccuuuacagucuuuacaga

SEQ ID NO: 2580577 - RNA, 19 nt, Artificial Sequence
  Description of Artificial Sequence: Synthetic oligonucleotide
  Antisense strand to SEQ ID NO: 2580576
ucuguaaagacuguaaagg

SEQ ID NO: 2580578 - RNA, 19 nt, Artificial Sequence
  Description of Artificial Sequence: Synthetic oligonucleotide
  Sense strand starting at position 1484 of SEQ ID NO: 1889135
aguugauaauucccgucaa

SEQ ID NO: 2580579 - RNA, 19 nt, Artificial Sequence
  Description of Artificial Sequence: Synthetic oligonucleotide
  Antisense strand to SEQ ID NO: 2580578
uugacgggaauuaucaacu

SEQ ID NO: 2580580 - RNA, 19 nt, Artificial Sequence
  Description of Artificial Sequence: Synthetic oligonucleotide
  Sense strand starting at position 1497 of SEQ ID NO: 1889135
cgucaagcaaaucagagau

SEQ ID NO: 2580581 - RNA, 19 nt, Artificial Sequence
  Description of Artificial Sequence: Synthetic oligonucleotide
  Antisense strand to SEQ ID NO: 2580580
aucucugauuugcuugacg

SEQ ID NO: 2580582 - RNA, 19 nt, Artificial Sequence
  Description of Artificial Sequence: Synthetic oligonucleotide
  Sense strand starting at position 1503 of SEQ ID NO: 1889135
gcaaaucagagaugugaca

SEQ ID NO: 2580583 - RNA, 19 nt, Artificial Sequence
  Description of Artificial Sequence: Synthetic oligonucleotide
  Antisense strand to SEQ ID NO: 2580582
ugucacaucucugauuugc

SEQ ID NO: 2580584 - RNA, 19 nt, Artificial Sequence
  Description of Artificial Sequence: Synthetic oligonucleotide
  Sense strand starting at position 1515 of SEQ ID NO: 1889135
ugugacaugcguugacuaa

SEQ ID NO: 2580585 - RNA, 19 nt, Artificial Sequence
  Description of Artificial Sequence: Synthetic oligonucleotide
  Antisense strand to SEQ ID NO: 2580584
uuagucaacgcaugucaca

SEQ ID NO: 2580586 - RNA, 19 nt, Artificial Sequence
  Description of Artificial Sequence: Synthetic oligonucleotide
  Sense strand starting at position 1516 of SEQ ID NO: 1889135
gugacaugcguugacuaaa

SEQ ID NO: 2580587 - RNA, 19 nt, Artificial Sequence
  Description of Artificial Sequence: Synthetic oligonucleotide
  Antisense strand to SEQ ID NO: 2580586
uuuagucaacgcaugucac

SEQ ID NO: 2580588 - RNA, 19 nt, Artificial Sequence
  Description of Artificial Sequence: Synthetic oligonucleotide
  Sense strand starting at position 1548 of SEQ ID NO: 1889135
aaucgccuugguuaaguau

SEQ ID NO: 2580589 - RNA, 19 nt, Artificial Sequence
  Description of Artificial Sequence: Synthetic oligonucleotide
  Antisense strand to SEQ ID NO: 2580588
auacuuaaccaaggcgauu

SEQ ID NO: 2580590 - RNA, 19 nt, Artificial Sequence
  Description of Artificial Sequence: Synthetic oligonucleotide
  Sense strand starting at position 1551 of SEQ ID NO: 1889135
cgccuugguuaaguauauu

SEQ ID NO: 2580591 - RNA, 19 nt, Artificial Sequence
  Description of Artificial Sequence: Synthetic oligonucleotide
  Antisense strand to SEQ ID NO: 2580590
aauauacuuaaccaaggcg

SEQ ID NO: 2580592 - RNA, 19 nt, Artificial Sequence
  Description of Artificial Sequence: Synthetic oligonucleotide
  Sense strand starting at position 1559 of SEQ ID NO: 1889135
uuaaguauauugccuguau

SEQ ID NO: 2580593 - RNA, 19 nt, Artificial Sequence
  Description of Artificial Sequence: Synthetic oligonucleotide
  Antisense strand to SEQ ID NO: 2580592
auacaggcaauauacuuaa

SEQ ID NO: 2580594 - RNA, 19 nt, Artificial Sequence
  Description of Artificial Sequence: Synthetic oligonucleotide
  Sense strand starting at position 1660 of SEQ ID NO: 1889135
ccacaacuagucggacaua

SEQ ID NO: 2580595 - RNA, 19 nt, Artificial Sequence
  Description of Artificial Sequence: Synthetic oligonucleotide
  Antisense strand to SEQ ID NO: 2580594
uauguccgacuaguugugg

SEQ ID NO: 2580596 - RNA, 19 nt, Artificial Sequence
  Description of Artificial Sequence: Synthetic oligonucleotide
  Sense strand starting at position 1663 of SEQ ID NO: 1889135
caacuagucggacauauua

SEQ ID NO: 2580597 - RNA, 19 nt, Artificial Sequence
  Description of Artificial Sequence: Synthetic oligonucleotide
  Antisense strand to SEQ ID NO: 2580596
uaauauguccgacuaguug

SEQ ID NO: 2580598 - RNA, 19 nt, Artificial Sequence
  Description of Artificial Sequence: Synthetic oligonucleotide
  Sense strand starting at position 1671 of SEQ ID NO: 1889135
cggacauauuaggcaguua

SEQ ID NO: 2580599 - RNA, 19 nt, Artificial Sequence
  Description of Artificial Sequence: Synthetic oligonucleotide
  Antisense strand to SEQ ID NO: 2580598
uaacugccuaauauguccg

SEQ ID NO: 2580600 - RNA, 19 nt, Artificial Sequence
  Description of Artificial Sequence: Synthetic oligonucleotide
  Sense strand starting at position 1676 of SEQ ID NO: 1889135
auauuaggcaguuaaaggu

SEQ ID NO: 2580601 - RNA, 19 nt, Artificial Sequence
  Description of Artificial Sequence: Synthetic oligonucleotide
  Antisense strand to SEQ ID NO: 2580600
accuuuaacugccuaauau

SEQ ID NO: 2580602 - RNA, 19 nt, Artificial Sequence
  Description of Artificial Sequence: Synthetic oligonucleotide
  Sense strand starting at position 2145 of SEQ ID NO: 1889135
cuccauuaugucgcgguaa

SEQ ID NO: 2580603 - RNA, 19 nt, Artificial Sequence
  Description of Artificial Sequence: Synthetic oligonucleotide
  Antisense strand to SEQ ID NO: 2580602
uuaccgcgacauaauggag

SEQ ID NO: 2580604 - RNA, 19 nt, Artificial Sequence
  Description of Artificial Sequence: Synthetic oligonucleotide
  Sense strand starting at position 2317 of SEQ ID NO: 1889135
ugaaacaucuuacuucgua

SEQ ID NO: 2580605 - RNA, 19 nt, Artificial Sequence
  Description of Artificial Sequence: Synthetic oligonucleotide
  Antisense strand to SEQ ID NO: 2580604
uacgaaguaagauguuuca

SEQ ID NO: 2580606 - RNA, 19 nt, Artificial Sequence
  Description of Artificial Sequence: Synthetic oligonucleotide
  Sense strand starting at position 2448 of SEQ ID NO: 1889135
ggcgguugccugugaggaa

SEQ ID NO: 2580607 - RNA, 19 nt, Artificial Sequence
  Description of Artificial Sequence: Synthetic oligonucleotide
  Antisense strand to SEQ ID NO: 2580606
uuccucacaggcaaccgcc

SEQ ID NO: 2580608 - RNA, 19 nt, Artificial Sequence
  Description of Artificial Sequence: Synthetic oligonucleotide
  Sense strand starting at position 3000 of SEQ ID NO: 1889135
caaggagggcaucguguua

SEQ ID NO: 2580609 - RNA, 19 nt, Artificial Sequence
  Description of Artificial Sequence: Synthetic oligonucleotide
  Antisense strand to SEQ ID NO: 2580608
uaacacgaugcccuccuug

SEQ ID NO: 2580610 - RNA, 19 nt, Artificial Sequence
  Description of Artificial Sequence: Synthetic oligonucleotide
  Sense strand starting at position 3099 of SEQ ID NO: 1889135
augacaucauggcagagau

SEQ ID NO: 2580611 - RNA, 19 nt, Artificial Sequence
  Description of Artificial Sequence: Synthetic oligonucleotide
  Antisense strand to SEQ ID NO: 2580610
aucucugccaugaugucau

SEQ ID NO: 2580612 - RNA, 19 nt, Artificial Sequence
  Description of Artificial Sequence: Synthetic oligonucleotide
  Sense strand starting at position 3237 of SEQ ID NO: 1889135
uggagcugggcucgguaaa

SEQ ID NO: 2580613 - RNA, 19 nt, Artificial Sequence
  Description of Artificial Sequence: Synthetic oligonucleotide
  Antisense strand to SEQ ID NO: 2580612
uuuaccgagcccagcucca

SEQ ID NO: 2580614 - RNA, 19 nt, Artificial Sequence
  Description of Artificial Sequence: Synthetic oligonucleotide
  Sense strand starting at position 3238 of SEQ ID NO: 1889135
ggagcugggcucgguaaau

SEQ ID NO: 2580615 - RNA, 19 nt, Artificial Sequence
  Description of Artificial Sequence: Synthetic oligonucleotide
  Antisense strand to SEQ ID NO: 2580614
auuuaccgagcccagcucc

SEQ ID NO: 2580616 - RNA, 19 nt, Artificial Sequence
  Description of Artificial Sequence: Synthetic oligonucleotide
  Sense strand starting at position 3310 of SEQ ID NO: 1889135
cugucaauucgggauggcu

SEQ ID NO: 2580617 - RNA, 19 nt, Artificial Sequence
  Description of Artificial Sequence: Synthetic oligonucleotide
  Antisense strand to SEQ ID NO: 2580616
agccaucccgaauugacag

SEQ ID NO: 2580618 - RNA, 19 nt, Artificial Sequence
  Description of Artificial Sequence: Synthetic oligonucleotide
  Sense strand starting at position 3515 of SEQ ID NO: 1889135
gcacaauacucacaaggga

SEQ ID NO: 2580619 - RNA, 19 nt, Artificial Sequence
  Description of Artificial Sequence: Synthetic oligonucleotide
  Antisense strand to SEQ ID NO: 2580618
ucccuugugaguauugugc

SEQ ID NO: 2580620 - RNA, 19 nt, Artificial Sequence
  Description of Artificial Sequence: Synthetic oligonucleotide
  Sense strand starting at position 3542 of SEQ ID NO: 1889135
gcucaaaggacccgucaua

SEQ ID NO: 2580621 - RNA, 19 nt, Artificial Sequence
  Description of Artificial Sequence: Synthetic oligonucleotide
  Antisense strand to SEQ ID NO: 2580620
uaugacggguccuuugagc

SEQ ID NO: 2580622 - RNA, 19 nt, Artificial Sequence
  Description of Artificial Sequence: Synthetic oligonucleotide
  Sense strand starting at position 3671 of SEQ ID NO: 1889135
gcaggcuuaccucagaaac

SEQ ID NO: 2580623 - RNA, 19 nt, Artificial Sequence
  Description of Artificial Sequence: Synthetic oligonucleotide
  Antisense strand to SEQ ID NO: 2580622
guuucugagguaagccugc

SEQ ID NO: 2580624 - RNA, 19 nt, Artificial Sequence
  Description of Artificial Sequence: Synthetic oligonucleotide
  Sense strand starting at position 3800 of SEQ ID NO: 1889135
augguuaggcccugagcau

SEQ ID NO: 2580625 - RNA, 19 nt, Artificial Sequence
  Description of Artificial Sequence: Synthetic oligonucleotide
  Antisense strand to SEQ ID NO: 2580624
augcucagggccuaaccau

SEQ ID NO: 2580626 - RNA, 19 nt, Artificial Sequence
  Description of Artificial Sequence: Synthetic oligonucleotide
  Sense strand starting at position 3801 of SEQ ID NO: 1889135
ugguuaggcccugagcaua

SEQ ID NO: 2580627 - RNA, 19 nt, Artificial Sequence
  Description of Artificial Sequence: Synthetic oligonucleotide
  Antisense strand to SEQ ID NO: 2580626
uaugcucagggccuaacca

SEQ ID NO: 2580628 - RNA, 19 nt, Artificial Sequence
  Description of Artificial Sequence: Synthetic oligonucleotide
  Sense strand starting at position 3817 of SEQ ID NO: 1889135
auauauaaccuccguugaa

SEQ ID NO: 2580629 - RNA, 19 nt, Artificial Sequence
  Description of Artificial Sequence: Synthetic oligonucleotide
  Antisense strand to SEQ ID NO: 2580628
uucaacggagguuauauau

SEQ ID NO: 2580630 - RNA, 19 nt, Artificial Sequence
  Description of Artificial Sequence: Synthetic oligonucleotide
  Sense strand starting at position 3830 of SEQ ID NO: 1889135
guugaaaccacucgagucu

SEQ ID NO: 2580631 - RNA, 19 nt, Artificial Sequence
  Description of Artificial Sequence: Synthetic oligonucleotide
  Antisense strand to SEQ ID NO: 2580630
agacucgagugguuucaac

SEQ ID NO: 2580632 - RNA, 19 nt, Artificial Sequence
  Description of Artificial Sequence: Synthetic oligonucleotide
  Sense strand starting at position 62 of SEQ ID NO: 1889136
ugcuauuucuuagagguca

SEQ ID NO: 2580633 - RNA, 19 nt, Artificial Sequence
  Description of Artificial Sequence: Synthetic oligonucleotide
  Antisense strand to SEQ ID NO: 2580632
ugaccucuaagaaauagca

SEQ ID NO: 2580634 - RNA, 19 nt, Artificial Sequence
  Description of Artificial Sequence: Synthetic oligonucleotide
  Sense strand starting at position 120 of SEQ ID NO: 1889136
uggaaauauguuggcuuau

SEQ ID NO: 2580635 - RNA, 19 nt, Artificial Sequence
  Description of Artificial Sequence: Synthetic oligonucleotide
  Antisense strand to SEQ ID NO: 2580634
auaagccaacauauuucca

SEQ ID NO: 2580636 - RNA, 19 nt, Artificial Sequence
  Description of Artificial Sequence: Synthetic oligonucleotide
  Sense strand starting at position 121 of SEQ ID NO: 1889136
ggaaauauguuggcuuaug

SEQ ID NO: 2580637 - RNA, 19 nt, Artificial Sequence
  Description of Artificial Sequence: Synthetic oligonucleotide
  Antisense strand to SEQ ID NO: 2580636
cauaagccaacauauuucc

SEQ ID NO: 2580638 - RNA, 19 nt, Artificial Sequence
  Description of Artificial Sequence: Synthetic oligonucleotide
  Sense strand starting at position 131 of SEQ ID NO: 1889136
uggcuuauguaucuugaag

SEQ ID NO: 2580639 - RNA, 19 nt, Artificial Sequence
  Description of Artificial Sequence: Synthetic oligonucleotide
  Antisense strand to SEQ ID NO: 2580638
cuucaagauacauaagcca

SEQ ID NO: 2580640 - RNA, 19 nt, Artificial Sequence
  Description of Artificial Sequence: Synthetic oligonucleotide
  Sense strand starting at position 142 of SEQ ID NO: 1889136
ucuugaaguugauaaauac

SEQ ID NO: 2580641 - RNA, 19 nt, Artificial Sequence
  Description of Artificial Sequence: Synthetic oligonucleotide
  Antisense strand to SEQ ID NO: 2580640
guauuuaucaacuucaaga

SEQ ID NO: 2580642 - RNA, 19 nt, Artificial Sequence
  Description of Artificial Sequence: Synthetic oligonucleotide
  Sense strand starting at position 254 of SEQ ID NO: 1889136
uuaauuaguucugcuuaag

SEQ ID NO: 2580643 - RNA, 19 nt, Artificial Sequence
  Description of Artificial Sequence: Synthetic oligonucleotide
  Antisense strand to SEQ ID NO: 2580642
cuuaagcagaacuaauuaa

SEQ ID NO: 2580644 - RNA, 19 nt, Artificial Sequence
  Description of Artificial Sequence: Synthetic oligonucleotide
  Sense strand starting at position 266 of SEQ ID NO: 1889136
gcuuaagcuucuuuacuag

SEQ ID NO: 2580645 - RNA, 19 nt, Artificial Sequence
  Description of Artificial Sequence: Synthetic oligonucleotide
  Antisense strand to SEQ ID NO: 2580644
cuaguaaagaagcuuaagc

SEQ ID NO: 2580646 - RNA, 19 nt, Artificial Sequence
  Description of Artificial Sequence: Synthetic oligonucleotide
  Sense strand starting at position 272 of SEQ ID NO: 1889136
gcuucuuuacuaggaaauu

SEQ ID NO: 2580647 - RNA, 19 nt, Artificial Sequence
  Description of Artificial Sequence: Synthetic oligonucleotide
  Antisense strand to SEQ ID NO: 2580646
aauuuccuaguaaagaagc

SEQ ID NO: 2580648 - RNA, 19 nt, Artificial Sequence
  Description of Artificial Sequence: Synthetic oligonucleotide
  Sense strand starting at position 1049 of SEQ ID NO: 1889136
ucugcacuacugugauauc

SEQ ID NO: 2580649 - RNA, 19 nt, Artificial Sequence
  Description of Artificial Sequence: Synthetic oligonucleotide
  Antisense strand to SEQ ID NO: 2580648
gauaucacaguagugcaga

SEQ ID NO: 2580650 - RNA, 19 nt, Artificial Sequence
  Description of Artificial Sequence: Synthetic oligonucleotide
  Sense strand starting at position 1067 of SEQ ID NO: 1889136
ccaguuaauuuacgaauau

SEQ ID NO: 2580651 - RNA, 19 nt, Artificial Sequence
  Description of Artificial Sequence: Synthetic oligonucleotide
  Antisense strand to SEQ ID NO: 2580650
auauucguaaauuaacugg

SEQ ID NO: 2580652 - RNA, 19 nt, Artificial Sequence
  Description of Artificial Sequence: Synthetic oligonucleotide
  Sense strand starting at position 1187 of SEQ ID NO: 1889136
gucuuuauauaagcuguaa

SEQ ID NO: 2580653 - RNA, 19 nt, Artificial Sequence
  Description of Artificial Sequence: Synthetic oligonucleotide
  Antisense strand to SEQ ID NO: 2580652
uuacagcuuauauaaagac

SEQ ID NO: 2580654 - RNA, 19 nt, Artificial Sequence
  Description of Artificial Sequence: Synthetic oligonucleotide
  Sense strand starting at position 1202 of SEQ ID NO: 1889136
guaagaaugccuuguacau

SEQ ID NO: 2580655 - RNA, 19 nt, Artificial Sequence
  Description of Artificial Sequence: Synthetic oligonucleotide
  Antisense strand to SEQ ID NO: 2580654
auguacaaggcauucuuac

SEQ ID NO: 2580656 - RNA, 19 nt, Artificial Sequence
  Description of Artificial Sequence: Synthetic oligonucleotide
  Sense strand starting at position 1215 of SEQ ID NO: 1889136
guacauaagcauuauugaa

SEQ ID NO: 2580657 - RNA, 19 nt, Artificial Sequence
  Description of Artificial Sequence: Synthetic oligonucleotide
  Antisense strand to SEQ ID NO: 2580656
uucaauaaugcuuauguac

SEQ ID NO: 2580658 - RNA, 19 nt, Artificial Sequence
  Description of Artificial Sequence: Synthetic oligonucleotide
  Sense strand starting at position 1307 of SEQ ID NO: 1889136
gcuugaucccugggcuuua

SEQ ID NO: 2580659 - RNA, 19 nt, Artificial Sequence
  Description of Artificial Sequence: Synthetic oligonucleotide
  Antisense strand to SEQ ID NO: 2580658
uaaagcccagggaucaagc

SEQ ID NO: 2580660 - RNA, 19 nt, Artificial Sequence
  Description of Artificial Sequence: Synthetic oligonucleotide
  Sense strand starting at position 1308 of SEQ ID NO: 1889136
cuugaucccugggcuuuaa

SEQ ID NO: 2580661 - RNA, 19 nt, Artificial Sequence
  Description of Artificial Sequence: Synthetic oligonucleotide
  Antisense strand to SEQ ID NO: 2580660
uuaaagcccagggaucaag

SEQ ID NO: 2580662 - RNA, 19 nt, Artificial Sequence
  Description of Artificial Sequence: Synthetic oligonucleotide
  Sense strand starting at position 1496 of SEQ ID NO: 1889136
gcacucugaccucguaaga

SEQ ID NO: 2580663 - RNA, 19 nt, Artificial Sequence
  Description of Artificial Sequence: Synthetic oligonucleotide
  Antisense strand to SEQ ID NO: 2580662
ucuuacgaggucagagugc

SEQ ID NO: 2580664 - RNA, 19 nt, Artificial Sequence
  Description of Artificial Sequence: Synthetic oligonucleotide
  Sense strand starting at position 1635 of SEQ ID NO: 1889136
agaauacuucuaggagcuu

SEQ ID NO: 2580665 - RNA, 19 nt, Artificial Sequence
  Description of Artificial Sequence: Synthetic oligonucleotide
  Antisense strand to SEQ ID NO: 2580664
aagcuccuagaaguauucu

SEQ ID NO: 2580666 - RNA, 19 nt, Artificial Sequence
  Description of Artificial Sequence: Synthetic oligonucleotide
  Sense strand starting at position 1712 of SEQ ID NO: 1889136
auccaaucacuucgucgau

SEQ ID NO: 2580667 - RNA, 19 nt, Artificial Sequence
  Description of Artificial Sequence: Synthetic oligonucleotide
  Antisense strand to SEQ ID NO: 2580666
aucgacgaagugauuggau

SEQ ID NO: 2580668 - RNA, 19 nt, Artificial Sequence
  Description of Artificial Sequence: Synthetic oligonucleotide
  Sense strand starting at position 1804 of SEQ ID NO: 1889136
aguuaucgaucuguaauua

SEQ ID NO: 2580669 - RNA, 19 nt, Artificial Sequence
  Description of Artificial Sequence: Synthetic oligonucleotide
  Antisense strand to SEQ ID NO: 2580668
uaauuacagaucgauaacu

SEQ ID NO: 2580670 - RNA, 19 nt, Artificial Sequence
  Description of Artificial Sequence: Synthetic oligonucleotide
  Sense strand starting at position 1805 of SEQ ID NO: 1889136
guuaucgaucuguaauuau

SEQ ID NO: 2580671 - RNA, 19 nt, Artificial Sequence
  Description of Artificial Sequence: Synthetic oligonucleotide
  Antisense strand to SEQ ID NO: 2580670
auaauuacagaucgauaac

SEQ ID NO: 2580672 - RNA, 19 nt, Artificial Sequence
  Description of Artificial Sequence: Synthetic oligonucleotide
  Sense strand starting at position 1814 of SEQ ID NO: 1889136
cuguaauuaugcccaugua

SEQ ID NO: 2580673 - RNA, 19 nt, Artificial Sequence
  Description of Artificial Sequence: Synthetic oligonucleotide
  Antisense strand to SEQ ID NO: 2580672
uacaugggcauaauuacag

SEQ ID NO: 2580674 - RNA, 19 nt, Artificial Sequence
  Description of Artificial Sequence: Synthetic oligonucleotide
  Sense strand starting at position 1815 of SEQ ID NO: 1889136
uguaauuaugcccauguau

SEQ ID NO: 2580675 - RNA, 19 nt, Artificial Sequence
  Description of Artificial Sequence: Synthetic oligonucleotide
  Antisense strand to SEQ ID NO: 2580674
auacaugggcauaauuaca

SEQ ID NO: 2580676 - RNA, 19 nt, Artificial Sequence
  Description of Artificial Sequence: Synthetic oligonucleotide
  Sense strand starting at position 1837 of SEQ ID NO: 1889136
ucacuucucuuguuugaug

SEQ ID NO: 2580677 - RNA, 19 nt, Artificial Sequence
  Description of Artificial Sequence: Synthetic oligonucleotide
  Antisense strand to SEQ ID NO: 2580676
caucaaacaagagaaguga

SEQ ID NO: 2580678 - RNA, 19 nt, Artificial Sequence
  Description of Artificial Sequence: Synthetic oligonucleotide
  Sense strand starting at position 1839 of SEQ ID NO: 1889136
acuucucuuguuugaugaa

SEQ ID NO: 2580679 - RNA, 19 nt, Artificial Sequence
  Description of Artificial Sequence: Synthetic oligonucleotide
  Antisense strand to SEQ ID NO: 2580678
uucaucaaacaagagaagu

SEQ ID NO: 2580680 - RNA, 19 nt, Artificial Sequence
  Description of Artificial Sequence: Synthetic oligonucleotide
  Sense strand starting at position 2054 of SEQ ID NO: 1889136
uguugaaaucaagagugua

SEQ ID NO: 2580681 - RNA, 19 nt, Artificial Sequence
  Description of Artificial Sequence: Synthetic oligonucleotide
  Antisense strand to SEQ ID NO: 2580680
uacacucuugauuucaaca

SEQ ID NO: 2580682 - RNA, 19 nt, Artificial Sequence
  Description of Artificial Sequence: Synthetic oligonucleotide
  Sense strand starting at position 2062 of SEQ ID NO: 1889136
ucaagaguguauccaccau

SEQ ID NO: 2580683 - RNA, 19 nt, Artificial Sequence
  Description of Artificial Sequence: Synthetic oligonucleotide
  Antisense strand to SEQ ID NO: 2580682
augguggauacacucuuga

SEQ ID NO: 2580684 - RNA, 19 nt, Artificial Sequence
  Description of Artificial Sequence: Synthetic oligonucleotide
  Sense strand starting at position 2066 of SEQ ID NO: 1889136
gaguguauccaccaucaug

SEQ ID NO: 2580685 - RNA, 19 nt, Artificial Sequence
  Description of Artificial Sequence: Synthetic oligonucleotide
  Antisense strand to SEQ ID NO: 2580684
caugaugguggauacacuc

SEQ ID NO: 2580686 - RNA, 19 nt, Artificial Sequence
  Description of Artificial Sequence: Synthetic oligonucleotide
  Sense strand starting at position 2688 of SEQ ID NO: 1889136
ccaauuuccaggugguguu

SEQ ID NO: 2580687 - RNA, 19 nt, Artificial Sequence
  Description of Artificial Sequence: Synthetic oligonucleotide
  Antisense strand to SEQ ID NO: 2580686
aacaccaccuggaaauugg

SEQ ID NO: 2580688 - RNA, 19 nt, Artificial Sequence
  Description of Artificial Sequence: Synthetic oligonucleotide
  Sense strand starting at position 2701 of SEQ ID NO: 1889136
gguguuucagguuagacua

SEQ ID NO: 2580689 - RNA, 19 nt, Artificial Sequence
  Description of Artificial Sequence: Synthetic oligonucleotide
  Antisense strand to SEQ ID NO: 2580688
uagucuaaccugaaacacc

SEQ ID NO: 2580690 - RNA, 19 nt, Artificial Sequence
  Description of Artificial Sequence: Synthetic oligonucleotide
  Sense strand starting at position 2708 of SEQ ID NO: 1889136
cagguuagacuaugcacau

SEQ ID NO: 2580691 - RNA, 19 nt, Artificial Sequence
  Description of Artificial Sequence: Synthetic oligonucleotide
  Antisense strand to SEQ ID NO: 2580690
augugcauagucuaaccug

SEQ ID NO: 2580692 - RNA, 19 nt, Artificial Sequence
  Description of Artificial Sequence: Synthetic oligonucleotide
  Sense strand starting at position 2709 of SEQ ID NO: 1889136
agguuagacuaugcacauu

SEQ ID NO: 2580693 - RNA, 19 nt, Artificial Sequence
  Description of Artificial Sequence: Synthetic oligonucleotide
  Antisense strand to SEQ ID NO: 2580692
aaugugcauagucuaaccu

SEQ ID NO: 2580694 - RNA, 19 nt, Artificial Sequence
  Description of Artificial Sequence: Synthetic oligonucleotide
  Sense strand starting at position 2735 of SEQ ID NO: 1889136
auggcagaguauuauuuaa

SEQ ID NO: 2580695 - RNA, 19 nt, Artificial Sequence
  Description of Artificial Sequence: Synthetic oligonucleotide
  Antisense strand to SEQ ID NO: 2580694
uuaaauaauacucugccau

SEQ ID NO: 2580696 - RNA, 19 nt, Artificial Sequence
  Description of Artificial Sequence: Synthetic oligonucleotide
  Sense strand starting at position 2809 of SEQ ID NO: 1889136
uggagcaaacacuguaauu

SEQ ID NO: 2580697 - RNA, 19 nt, Artificial Sequence
  Description of Artificial Sequence: Synthetic oligonucleotide
  Antisense strand to SEQ ID NO: 2580696
aauuacaguguuugcucca

SEQ ID NO: 2580698 - RNA, 19 nt, Artificial Sequence
  Description of Artificial Sequence: Synthetic oligonucleotide
  Sense strand starting at position 2897 of SEQ ID NO: 1889136
uuugaagcuugguuaauac

SEQ ID NO: 2580699 - RNA, 19 nt, Artificial Sequence
  Description of Artificial Sequence: Synthetic oligonucleotide
  Antisense strand to SEQ ID NO: 2580698
guauuaaccaagcuucaaa

SEQ ID NO: 2580700 - RNA, 19 nt, Artificial Sequence
  Description of Artificial Sequence: Synthetic oligonucleotide
  Sense strand starting at position 2930 of SEQ ID NO: 1889136
ccaauaggcuuguuuguuu

SEQ ID NO: 2580701 - RNA, 19 nt, Artificial Sequence
  Description of Artificial Sequence: Synthetic oligonucleotide
  Antisense strand to SEQ ID NO: 2580700
aaacaaacaagccuauugg

SEQ ID NO: 2580702 - RNA, 19 nt, Artificial Sequence
  Description of Artificial Sequence: Synthetic oligonucleotide
  Sense strand starting at position 2962 of SEQ ID NO: 1889136
uuuauuuauugagaaggac

SEQ ID NO: 2580703 - RNA, 19 nt, Artificial Sequence
  Description of Artificial Sequence: Synthetic oligonucleotide
  Antisense strand to SEQ ID NO: 2580702
guccuucucaauaaauaaa

SEQ ID NO: 2580704 - RNA, 19 nt, Artificial Sequence
  Description of Artificial Sequence: Synthetic oligonucleotide
  Sense strand starting at position 3278 of SEQ ID NO: 1889136
uuaaauacgugguuuguuu

SEQ ID NO: 2580705 - RNA, 19 nt, Artificial Sequence
  Description of Artificial Sequence: Synthetic oligonucleotide
  Antisense strand to SEQ ID NO: 2580704
aaacaaaccacguauuuaa

SEQ ID NO: 2580706 - RNA, 19 nt, Artificial Sequence
  Description of Artificial Sequence: Synthetic oligonucleotide
  Sense strand starting at position 3503 of SEQ ID NO: 1889136
acaaacucccuguaucgaa

SEQ ID NO: 2580707 - RNA, 19 nt, Artificial Sequence
  Description of Artificial Sequence: Synthetic oligonucleotide
  Antisense strand to SEQ ID NO: 2580706
uucgauacagggaguuugu

SEQ ID NO: 2580708 - RNA, 19 nt, Artificial Sequence
  Description of Artificial Sequence: Synthetic oligonucleotide
  Sense strand starting at position 3542 of SEQ ID NO: 1889136
cuuagauauuugcacaugu

SEQ ID NO: 2580709 - RNA, 19 nt, Artificial Sequence
  Description of Artificial Sequence: Synthetic oligonucleotide
  Antisense strand to SEQ ID NO: 2580708
acaugugcaaauaucuaag

SEQ ID NO: 2580710 - RNA, 19 nt, Artificial Sequence
  Description of Artificial Sequence: Synthetic oligonucleotide
  Sense strand starting at position 3671 of SEQ ID NO: 1889136
aguucugggccucaaauua

SEQ ID NO: 2580711 - RNA, 19 nt, Artificial Sequence
  Description of Artificial Sequence: Synthetic oligonucleotide
  Antisense strand to SEQ ID NO: 2580710
uaauuugaggcccagaacu

SEQ ID NO: 2580712 - RNA, 19 nt, Artificial Sequence
  Description of Artificial Sequence: Synthetic oligonucleotide
  Sense strand starting at position 38 of SEQ ID NO: 1889137
aggguaaguuucuugcaca

SEQ ID NO: 2580713 - RNA, 19 nt, Artificial Sequence
  Description of Artificial Sequence: Synthetic oligonucleotide
  Antisense strand to SEQ ID NO: 2580712
ugugcaagaaacuuacccu

SEQ ID NO: 2580714 - RNA, 19 nt, Artificial Sequence
  Description of Artificial Sequence: Synthetic oligonucleotide
  Sense strand starting at position 171 of SEQ ID NO: 1889137
guaaguggagagugcuuaa

SEQ ID NO: 2580715 - RNA, 19 nt, Artificial Sequence
  Description of Artificial Sequence: Synthetic oligonucleotide
  Antisense strand to SEQ ID NO: 2580714
uuaagcacucuccacuuac

SEQ ID NO: 2580716 - RNA, 19 nt, Artificial Sequence
  Description of Artificial Sequence: Synthetic oligonucleotide
  Sense strand starting at position 174 of SEQ ID NO: 1889137
aguggagagugcuuaaaug

SEQ ID NO: 2580717 - RNA, 19 nt, Artificial Sequence
  Description of Artificial Sequence: Synthetic oligonucleotide
  Antisense strand to SEQ ID NO: 2580716
cauuuaagcacucuccacu

SEQ ID NO: 2580718 - RNA, 19 nt, Artificial Sequence
  Description of Artificial Sequence: Synthetic oligonucleotide
  Sense strand starting at position 247 of SEQ ID NO: 1889137
cugcuugagccacaucaua

SEQ ID NO: 2580719 - RNA, 19 nt, Artificial Sequence
  Description of Artificial Sequence: Synthetic oligonucleotide
  Antisense strand to SEQ ID NO: 2580718
uaugauguggcucaagcag

SEQ ID NO: 2580720 - RNA, 19 nt, Artificial Sequence
  Description of Artificial Sequence: Synthetic oligonucleotide
  Sense strand starting at position 646 of SEQ ID NO: 1889137
cccacauucccuuaguuga

SEQ ID NO: 2580721 - RNA, 19 nt, Artificial Sequence
  Description of Artificial Sequence: Synthetic oligonucleotide
  Antisense strand to SEQ ID NO: 2580720
ucaacuaagggaauguggg

SEQ ID NO: 2580722 - RNA, 19 nt, Artificial Sequence
  Description of Artificial Sequence: Synthetic oligonucleotide
  Sense strand starting at position 649 of SEQ ID NO: 1889137
acauucccuuaguugaaga

SEQ ID NO: 2580723 - RNA, 19 nt, Artificial Sequence
  Description of Artificial Sequence: Synthetic oligonucleotide
  Antisense strand to SEQ ID NO: 2580722
ucuucaacuaagggaaugu

SEQ ID NO: 2580724 - RNA, 19 nt, Artificial Sequence
  Description of Artificial Sequence: Synthetic oligonucleotide
  Sense strand starting at position 687 of SEQ ID NO: 1889137
caguguucaggugagugua

SEQ ID NO: 2580725 - RNA, 19 nt, Artificial Sequence
  Description of Artificial Sequence: Synthetic oligonucleotide
  Antisense strand to SEQ ID NO: 2580724
uacacucaccugaacacug

SEQ ID NO: 2580726 - RNA, 19 nt, Artificial Sequence
  Description of Artificial Sequence: Synthetic oligonucleotide
  Sense strand starting at position 690 of SEQ ID NO: 1889137
uguucaggugaguguacaa

SEQ ID NO: 2580727 - RNA, 19 nt, Artificial Sequence
  Description of Artificial Sequence: Synthetic oligonucleotide
  Antisense strand to SEQ ID NO: 2580726
uuguacacucaccugaaca

SEQ ID NO: 2580728 - RNA, 19 nt, Artificial Sequence
  Description of Artificial Sequence: Synthetic oligonucleotide
  Sense strand starting at position 1064 of SEQ ID NO: 1889137
ugacuucugcagggugaga

SEQ ID NO: 2580729 - RNA, 19 nt, Artificial Sequence
  Description of Artificial Sequence: Synthetic oligonucleotide
  Antisense strand to SEQ ID NO: 2580728
ucucacccugcagaaguca

SEQ ID NO: 2580730 - RNA, 19 nt, Artificial Sequence
  Description of Artificial Sequence: Synthetic oligonucleotide
  Sense strand starting at position 1276 of SEQ ID NO: 1889137
cugggucauugucucauuu

SEQ ID NO: 2580731 - RNA, 19 nt, Artificial Sequence
  Description of Artificial Sequence: Synthetic oligonucleotide
  Antisense strand to SEQ ID NO: 2580730
aaaugagacaaugacccag

SEQ ID NO: 2580732 - RNA, 19 nt, Artificial Sequence
  Description of Artificial Sequence: Synthetic oligonucleotide
  Sense strand starting at position 1299 of SEQ ID NO: 1889137
ggcugaaguuccuuccacu

SEQ ID NO: 2580733 - RNA, 19 nt, Artificial Sequence
  Description of Artificial Sequence: Synthetic oligonucleotide
  Antisense strand to SEQ ID NO: 2580732
aguggaaggaacuucagcc

SEQ ID NO: 2580734 - RNA, 19 nt, Artificial Sequence
  Description of Artificial Sequence: Synthetic oligonucleotide
  Sense strand starting at position 1487 of SEQ ID NO: 1889137
auaaauggccuuugacaca

SEQ ID NO: 2580735 - RNA, 19 nt, Artificial Sequence
  Description of Artificial Sequence: Synthetic oligonucleotide
  Antisense strand to SEQ ID NO: 2580734
ugugucaaaggccauuuau

SEQ ID NO: 2580736 - RNA, 19 nt, Artificial Sequence
  Description of Artificial Sequence: Synthetic oligonucleotide
  Sense strand starting at position 1580 of SEQ ID NO: 1889137
uugucuuagguccagacuu

SEQ ID NO: 2580737 - RNA, 19 nt, Artificial Sequence
  Description of Artificial Sequence: Synthetic oligonucleotide
  Antisense strand to SEQ ID NO: 2580736
aagucuggaccuaagacaa

SEQ ID NO: 2580738 - RNA, 19 nt, Artificial Sequence
  Description of Artificial Sequence: Synthetic oligonucleotide
  Sense strand starting at position 2078 of SEQ ID NO: 1889137
ucacaaugaguguaaccau

SEQ ID NO: 2580739 - RNA, 19 nt, Artificial Sequence
  Description of Artificial Sequence: Synthetic oligonucleotide
  Antisense strand to SEQ ID NO: 2580738
augguuacacucauuguga

SEQ ID NO: 2580740 - RNA, 19 nt, Artificial Sequence
  Description of Artificial Sequence: Synthetic oligonucleotide
  Sense strand starting at position 2085 of SEQ ID NO: 1889137
gaguguaaccauugccuag

SEQ ID NO: 2580741 - RNA, 19 nt, Artificial Sequence
  Description of Artificial Sequence: Synthetic oligonucleotide
  Antisense strand to SEQ ID NO: 2580740
cuaggcaaugguuacacuc

SEQ ID NO: 2580742 - RNA, 19 nt, Artificial Sequence
  Description of Artificial Sequence: Synthetic oligonucleotide
  Sense strand starting at position 2116 of SEQ ID NO: 1889137
guggcuugguggagaagaa

SEQ ID NO: 2580743 - RNA, 19 nt, Artificial Sequence
  Description of Artificial Sequence: Synthetic oligonucleotide
  Antisense strand to SEQ ID NO: 2580742
uucuucuccaccaagccac

SEQ ID NO: 2580744 - RNA, 19 nt, Artificial Sequence
  Description of Artificial Sequence: Synthetic oligonucleotide
  Sense strand starting at position 2131 of SEQ ID NO: 1889137
agaagaccuccguggaguu

SEQ ID NO: 2580745 - RNA, 19 nt, Artificial Sequence
  Description of Artificial Sequence: Synthetic oligonucleotide
  Antisense strand to SEQ ID NO: 2580744
aacuccacggaggucuucu

SEQ ID NO: 2580746 - RNA, 19 nt, Artificial Sequence
  Description of Artificial Sequence: Synthetic oligonucleotide
  Sense strand starting at position 2178 of SEQ ID NO: 1889137
cacugugggauccauggua

SEQ ID NO: 2580747 - RNA, 19 nt, Artificial Sequence
  Description of Artificial Sequence: Synthetic oligonucleotide
  Antisense strand to SEQ ID NO: 2580746
uaccauggaucccacagug

SEQ ID NO: 2580748 - RNA, 19 nt, Artificial Sequence
  Description of Artificial Sequence: Synthetic oligonucleotide
  Sense strand starting at position 2193 of SEQ ID NO: 1889137
gguauuguuccaugauccu

SEQ ID NO: 2580749 - RNA, 19 nt, Artificial Sequence
  Description of Artificial Sequence: Synthetic oligonucleotide
  Antisense strand to SEQ ID NO: 2580748
aggaucauggaacaauacc

SEQ ID NO: 2580750 - RNA, 19 nt, Artificial Sequence
  Description of Artificial Sequence: Synthetic oligonucleotide
  Sense strand starting at position 2358 of SEQ ID NO: 1889137
cacugugauuucuagguag

SEQ ID NO: 2580751 - RNA, 19 nt, Artificial Sequence
  Description of Artificial Sequence: Synthetic oligonucleotide
  Antisense strand to SEQ ID NO: 2580750
cuaccuagaaaucacagug

SEQ ID NO: 2580752 - RNA, 19 nt, Artificial Sequence
  Description of Artificial Sequence: Synthetic oligonucleotide
  Sense strand starting at position 2620 of SEQ ID NO: 1889137
acgugaaaggguuguaaua

SEQ ID NO: 2580753 - RNA, 19 nt, Artificial Sequence
  Description of Artificial Sequence: Synthetic oligonucleotide
  Antisense strand to SEQ ID NO: 2580752
uauuacaacccuuucacgu

SEQ ID NO: 2580754 - RNA, 19 nt, Artificial Sequence
  Description of Artificial Sequence: Synthetic oligonucleotide
  Sense strand starting at position 2630 of SEQ ID NO: 1889137
guuguaauagauugagauc

SEQ ID NO: 2580755 - RNA, 19 nt, Artificial Sequence
  Description of Artificial Sequence: Synthetic oligonucleotide
  Antisense strand to SEQ ID NO: 2580754
gaucucaaucuauuacaac

SEQ ID NO: 2580756 - RNA, 19 nt, Artificial Sequence
  Description of Artificial Sequence: Synthetic oligonucleotide
  Sense strand starting at position 2665 of SEQ ID NO: 1889137
gguuagagugguggguuaa

SEQ ID NO: 2580757 - RNA, 19 nt, Artificial Sequence
  Description of Artificial Sequence: Synthetic oligonucleotide
  Antisense strand to SEQ ID NO: 2580756
uuaacccaccacucuaacc

SEQ ID NO: 2580758 - RNA, 19 nt, Artificial Sequence
  Description of Artificial Sequence: Synthetic oligonucleotide
  Sense strand starting at position 2666 of SEQ ID NO: 1889137
guuagagugguggguuaaa

SEQ ID NO: 2580759 - RNA, 19 nt, Artificial Sequence
  Description of Artificial Sequence: Synthetic oligonucleotide
  Antisense strand to SEQ ID NO: 2580758
uuuaacccaccacucuaac

SEQ ID NO: 2580760 - RNA, 19 nt, Artificial Sequence
  Description of Artificial Sequence: Synthetic oligonucleotide
  Sense strand starting at position 2838 of SEQ ID NO: 1889137
gcacucacuagugagaguu

SEQ ID NO: 2580761 - RNA, 19 nt, Artificial Sequence
  Description of Artificial Sequence: Synthetic oligonucleotide
  Antisense strand to SEQ ID NO: 2580760
aacucucacuagugagugc

SEQ ID NO: 2580762 - RNA, 19 nt, Artificial Sequence
  Description of Artificial Sequence: Synthetic oligonucleotide
  Sense strand starting at position 2846 of SEQ ID NO: 1889137
uagugagaguucucuuucu

SEQ ID NO: 2580763 - RNA, 19 nt, Artificial Sequence
  Description of Artificial Sequence: Synthetic oligonucleotide
  Antisense strand to SEQ ID NO: 2580762
agaaagagaacucucacua

SEQ ID NO: 2580764 - RNA, 19 nt, Artificial Sequence
  Description of Artificial Sequence: Synthetic oligonucleotide
  Sense strand starting at position 2851 of SEQ ID NO: 1889137
agaguucucuuucucaucu

SEQ ID NO: 2580765 - RNA, 19 nt, Artificial Sequence
  Description of Artificial Sequence: Synthetic oligonucleotide
  Antisense strand to SEQ ID NO: 2580764
agaugagaaagagaacucu

SEQ ID NO: 2580766 - RNA, 19 nt, Artificial Sequence
  Description of Artificial Sequence: Synthetic oligonucleotide
  Sense strand starting at position 3096 of SEQ ID NO: 1889137
gggaucaaguaguuauaau

SEQ ID NO: 2580767 - RNA, 19 nt, Artificial Sequence
  Description of Artificial Sequence: Synthetic oligonucleotide
  Antisense strand to SEQ ID NO: 2580766
auuauaacuacuugauccc

SEQ ID NO: 2580768 - RNA, 19 nt, Artificial Sequence
  Description of Artificial Sequence: Synthetic oligonucleotide
  Sense strand starting at position 3334 of SEQ ID NO: 1889137
ugaguccuacaaugaguuu

SEQ ID NO: 2580769 - RNA, 19 nt, Artificial Sequence
  Description of Artificial Sequence: Synthetic oligonucleotide
  Antisense strand to SEQ ID NO: 2580768
aaacucauuguaggacuca

SEQ ID NO: 2580770 - RNA, 19 nt, Artificial Sequence
  Description of Artificial Sequence: Synthetic oligonucleotide
  Sense strand starting at position 3399 of SEQ ID NO: 1889137
uggaguagggcuugucauc

SEQ ID NO: 2580771 - RNA, 19 nt, Artificial Sequence
  Description of Artificial Sequence: Synthetic oligonucleotide
  Antisense strand to SEQ ID NO: 2580770
gaugacaagcccuacucca

SEQ ID NO: 2580772 - RNA, 19 nt, Artificial Sequence
  Description of Artificial Sequence: Synthetic oligonucleotide
  Sense strand starting at position 3435 of SEQ ID NO: 1889137
ggagguguuaucugggcuu

SEQ ID NO: 2580773 - RNA, 19 nt, Artificial Sequence
  Description of Artificial Sequence: Synthetic oligonucleotide
  Antisense strand to SEQ ID NO: 2580772
aagcccagauaacaccucc

SEQ ID NO: 2580774 - RNA, 19 nt, Artificial Sequence
  Description of Artificial Sequence: Synthetic oligonucleotide
  Sense strand starting at position 3495 of SEQ ID NO: 1889137
cuaugauggauccacgcua

SEQ ID NO: 2580775 - RNA, 19 nt, Artificial Sequence
  Description of Artificial Sequence: Synthetic oligonucleotide
  Antisense strand to SEQ ID NO: 2580774
uagcguggauccaucauag

SEQ ID NO: 2580776 - RNA, 19 nt, Artificial Sequence
  Description of Artificial Sequence: Synthetic oligonucleotide
  Sense strand starting at position 3500 of SEQ ID NO: 1889137
auggauccacgcuagaauu

SEQ ID NO: 2580777 - RNA, 19 nt, Artificial Sequence
  Description of Artificial Sequence: Synthetic oligonucleotide
  Antisense strand to SEQ ID NO: 2580776
aauucuagcguggauccau

SEQ ID NO: 2580778 - RNA, 19 nt, Artificial Sequence
  Description of Artificial Sequence: Synthetic oligonucleotide
  Sense strand starting at position 3524 of SEQ ID NO: 1889137
uacauuuguggcuguggga

SEQ ID NO: 2580779 - RNA, 19 nt, Artificial Sequence
  Description of Artificial Sequence: Synthetic oligonucleotide
  Antisense strand to SEQ ID NO: 2580778
ucccacagccacaaaugua

SEQ ID NO: 2580780 - RNA, 19 nt, Artificial Sequence
  Description of Artificial Sequence: Synthetic oligonucleotide
  Sense strand starting at position 3617 of SEQ ID NO: 1889137
cccgaucaucugggaagaa

SEQ ID NO: 2580781 - RNA, 19 nt, Artificial Sequence
  Description of Artificial Sequence: Synthetic oligonucleotide
  Antisense strand to SEQ ID NO: 2580780
uucuucccagaugaucggg

SEQ ID NO: 2580782 - RNA, 19 nt, Artificial Sequence
  Description of Artificial Sequence: Synthetic oligonucleotide
  Sense strand starting at position 3649 of SEQ ID NO: 1889137
ggcugaaauuguuucugua

SEQ ID NO: 2580783 - RNA, 19 nt, Artificial Sequence
  Description of Artificial Sequence: Synthetic oligonucleotide
  Antisense strand to SEQ ID NO: 2580782
uacagaaacaauuucagcc

SEQ ID NO: 2580784 - RNA, 19 nt, Artificial Sequence
  Description of Artificial Sequence: Synthetic oligonucleotide
  Sense strand starting at position 3651 of SEQ ID NO: 1889137
cugaaauuguuucuguaau

SEQ ID NO: 2580785 - RNA, 19 nt, Artificial Sequence
  Description of Artificial Sequence: Synthetic oligonucleotide
  Antisense strand to SEQ ID NO: 2580784
auuacagaaacaauuucag

SEQ ID NO: 2580786 - RNA, 19 nt, Artificial Sequence
  Description of Artificial Sequence: Synthetic oligonucleotide
  Sense strand starting at position 3671 of SEQ ID NO: 1889137
uucccuagagccuguaauu

SEQ ID NO: 2580787 - RNA, 19 nt, Artificial Sequence
  Description of Artificial Sequence: Synthetic oligonucleotide
  Antisense strand to SEQ ID NO: 2580786
aauuacaggcucuagggaa

SEQ ID NO: 2580788 - RNA, 19 nt, Artificial Sequence
  Description of Artificial Sequence: Synthetic oligonucleotide
  Sense strand starting at position 3837 of SEQ ID NO: 1889137
gagcuugugccggcuuuaa

SEQ ID NO: 2580789 - RNA, 19 nt, Artificial Sequence
  Description of Artificial Sequence: Synthetic oligonucleotide
  Antisense strand to SEQ ID NO: 2580788
uuaaagccggcacaagcuc

SEQ ID NO: 2580790 - RNA, 19 nt, Artificial Sequence
  Description of Artificial Sequence: Synthetic oligonucleotide
  Sense strand starting at position 3839 of SEQ ID NO: 1889137
gcuugugccggcuuuaauc

SEQ ID NO: 2580791 - RNA, 19 nt, Artificial Sequence
  Description of Artificial Sequence: Synthetic oligonucleotide
  Antisense strand to SEQ ID NO: 2580790
gauuaaagccggcacaagc

SEQ ID NO: 2580792 - RNA, 19 nt, Artificial Sequence
  Description of Artificial Sequence: Synthetic oligonucleotide
  Sense strand starting at position 37 of SEQ ID NO: 1889138
aggguaaguuucuugcaca

SEQ ID NO: 2580793 - RNA, 19 nt, Artificial Sequence
  Description of Artificial Sequence: Synthetic oligonucleotide
  Antisense strand to SEQ ID NO: 2580792
ugugcaagaaacuuacccu

SEQ ID NO: 2580794 - RNA, 19 nt, Artificial Sequence
  Description of Artificial Sequence: Synthetic oligonucleotide
  Sense strand starting at position 170 of SEQ ID NO: 1889138
guaaguggagagugcuuaa

SEQ ID NO: 2580795 - RNA, 19 nt, Artificial Sequence
  Description of Artificial Sequence: Synthetic oligonucleotide
  Antisense strand to SEQ ID NO: 2580794
uuaagcacucuccacuuac

SEQ ID NO: 2580796 - RNA, 19 nt, Artificial Sequence
  Description of Artificial Sequence: Synthetic oligonucleotide
  Sense strand starting at position 173 of SEQ ID NO: 1889138
aguggagagugcuuaaaug

SEQ ID NO: 2580797 - RNA, 19 nt, Artificial Sequence
  Description of Artificial Sequence: Synthetic oligonucleotide
  Antisense strand to SEQ ID NO: 2580796
cauuuaagcacucuccacu

SEQ ID NO: 2580798 - RNA, 19 nt, Artificial Sequence
  Description of Artificial Sequence: Synthetic oligonucleotide
  Sense strand starting at position 246 of SEQ ID NO: 1889138
cugcuugagccacaucaua

SEQ ID NO: 2580799 - RNA, 19 nt, Artificial Sequence
  Description of Artificial Sequence: Synthetic oligonucleotide
  Antisense strand to SEQ ID NO: 2580798
uaugauguggcucaagcag

SEQ ID NO: 2580800 - RNA, 19 nt, Artificial Sequence
  Description of Artificial Sequence: Synthetic oligonucleotide
  Sense strand starting at position 260 of SEQ ID NO: 1889138
ucauaagucucagugaauu

SEQ ID NO: 2580801 - RNA, 19 nt, Artificial Sequence
  Description of Artificial Sequence: Synthetic oligonucleotide
  Antisense strand to SEQ ID NO: 2580800
aauucacugagacuuauga

SEQ ID NO: 2580802 - RNA, 19 nt, Artificial Sequence
  Description of Artificial Sequence: Synthetic oligonucleotide
  Sense strand starting at position 645 of SEQ ID NO: 1889138
cccacauucccuuaguuga

SEQ ID NO: 2580803 - RNA, 19 nt, Artificial Sequence
  Description of Artificial Sequence: Synthetic oligonucleotide
  Antisense strand to SEQ ID NO: 2580802
ucaacuaagggaauguggg

SEQ ID NO: 2580804 - RNA, 19 nt, Artificial Sequence
  Description of Artificial Sequence: Synthetic oligonucleotide
  Sense strand starting at position 648 of SEQ ID NO: 1889138
acauucccuuaguugaaga

SEQ ID NO: 2580805 - RNA, 19 nt, Artificial Sequence
  Description of Artificial Sequence: Synthetic oligonucleotide
  Antisense strand to SEQ ID NO: 2580804
ucuucaacuaagggaaugu

SEQ ID NO: 2580806 - RNA, 19 nt, Artificial Sequence
  Description of Artificial Sequence: Synthetic oligonucleotide
  Sense strand starting at position 791 of SEQ ID NO: 1889138
gaauguggccuccacacuu

SEQ ID NO: 2580807 - RNA, 19 nt, Artificial Sequence
  Description of Artificial Sequence: Synthetic oligonucleotide
  Antisense strand to SEQ ID NO: 2580806
aaguguggaggccacauuc

SEQ ID NO: 2580808 - RNA, 19 nt, Artificial Sequence
  Description of Artificial Sequence: Synthetic oligonucleotide
  Sense strand starting at position 920 of SEQ ID NO: 1889138
ggugauccacugugugagu

SEQ ID NO: 2580809 - RNA, 19 nt, Artificial Sequence
  Description of Artificial Sequence: Synthetic oligonucleotide
  Antisense strand to SEQ ID NO: 2580808
acucacacaguggaucacc

SEQ ID NO: 2580810 - RNA, 19 nt, Artificial Sequence
  Description of Artificial Sequence: Synthetic oligonucleotide
  Sense strand starting at position 1063 of SEQ ID NO: 1889138
ugacuucugcagggugaga

SEQ ID NO: 2580811 - RNA, 19 nt, Artificial Sequence
  Description of Artificial Sequence: Synthetic oligonucleotide
  Antisense strand to SEQ ID NO: 2580810
ucucacccugcagaaguca

SEQ ID NO: 2580812 - RNA, 19 nt, Artificial Sequence
  Description of Artificial Sequence: Synthetic oligonucleotide
  Sense strand starting at position 1275 of SEQ ID NO: 1889138
cugggucauugucucauuu

SEQ ID NO: 2580813 - RNA, 19 nt, Artificial Sequence
  Description of Artificial Sequence: Synthetic oligonucleotide
  Antisense strand to SEQ ID NO: 2580812
aaaugagacaaugacccag

SEQ ID NO: 2580814 - RNA, 19 nt, Artificial Sequence
  Description of Artificial Sequence: Synthetic oligonucleotide
  Sense strand starting at position 1298 of SEQ ID NO: 1889138
ggcugaaguuccuuccacu

SEQ ID NO: 2580815 - RNA, 19 nt, Artificial Sequence
  Description of Artificial Sequence: Synthetic oligonucleotide
  Antisense strand to SEQ ID NO: 2580814
aguggaaggaacuucagcc

SEQ ID NO: 2580816 - RNA, 19 nt, Artificial Sequence
  Description of Artificial Sequence: Synthetic oligonucleotide
  Sense strand starting at position 1579 of SEQ ID NO: 1889138
uugucuuagguccagacuu

SEQ ID NO: 2580817 - RNA, 19 nt, Artificial Sequence
  Description of Artificial Sequence: Synthetic oligonucleotide
  Antisense strand to SEQ ID NO: 2580816
aagucuggaccuaagacaa

SEQ ID NO: 2580818 - RNA, 19 nt, Artificial Sequence
  Description of Artificial Sequence: Synthetic oligonucleotide
  Sense strand starting at position 1848 of SEQ ID NO: 1889138
augacauggccauggagau

SEQ ID NO: 2580819 - RNA, 19 nt, Artificial Sequence
  Description of Artificial Sequence: Synthetic oligonucleotide
  Antisense strand to SEQ ID NO: 2580818
aucuccauggccaugucau

SEQ ID NO: 2580820 - RNA, 19 nt, Artificial Sequence
  Description of Artificial Sequence: Synthetic oligonucleotide
  Sense strand starting at position 2077 of SEQ ID NO: 1889138
ucacaaugaguguaaccau

SEQ ID NO: 2580821 - RNA, 19 nt, Artificial Sequence
  Description of Artificial Sequence: Synthetic oligonucleotide
  Antisense strand to SEQ ID NO: 2580820
augguuacacucauuguga

SEQ ID NO: 2580822 - RNA, 19 nt, Artificial Sequence
  Description of Artificial Sequence: Synthetic oligonucleotide
  Sense strand starting at position 2084 of SEQ ID NO: 1889138
gaguguaaccauugccuag

SEQ ID NO: 2580823 - RNA, 19 nt, Artificial Sequence
  Description of Artificial Sequence: Synthetic oligonucleotide
  Antisense strand to SEQ ID NO: 2580822
cuaggcaaugguuacacuc

SEQ ID NO: 2580824 - RNA, 19 nt, Artificial Sequence
  Description of Artificial Sequence: Synthetic oligonucleotide
  Sense strand starting at position 2115 of SEQ ID NO: 1889138
guggcuugguggagaagaa

SEQ ID NO: 2580825 - RNA, 19 nt, Artificial Sequence
  Description of Artificial Sequence: Synthetic oligonucleotide
  Antisense strand to SEQ ID NO: 2580824
uucuucuccaccaagccac

SEQ ID NO: 2580826 - RNA, 19 nt, Artificial Sequence
  Description of Artificial Sequence: Synthetic oligonucleotide
  Sense strand starting at position 2130 of SEQ ID NO: 1889138
agaagaccuccguggaguu

SEQ ID NO: 2580827 - RNA, 19 nt, Artificial Sequence
  Description of Artificial Sequence: Synthetic oligonucleotide
  Antisense strand to SEQ ID NO: 2580826
aacuccacggaggucuucu

SEQ ID NO: 2580828 - RNA, 19 nt, Artificial Sequence
  Description of Artificial Sequence: Synthetic oligonucleotide
  Sense strand starting at position 2177 of SEQ ID NO: 1889138
cacugugggauccauggua

SEQ ID NO: 2580829 - RNA, 19 nt, Artificial Sequence
  Description of Artificial Sequence: Synthetic oligonucleotide
  Antisense strand to SEQ ID NO: 2580828
uaccauggaucccacagug

SEQ ID NO: 2580830 - RNA, 19 nt, Artificial Sequence
  Description of Artificial Sequence: Synthetic oligonucleotide
  Sense strand starting at position 2192 of SEQ ID NO: 1889138
gguauuguuccaugauccu

SEQ ID NO: 2580831 - RNA, 19 nt, Artificial Sequence
  Description of Artificial Sequence: Synthetic oligonucleotide
  Antisense strand to SEQ ID NO: 2580830
aggaucauggaacaauacc

SEQ ID NO: 2580832 - RNA, 19 nt, Artificial Sequence
  Description of Artificial Sequence: Synthetic oligonucleotide
  Sense strand starting at position 2357 of SEQ ID NO: 1889138
cacugugauuucuagguag

SEQ ID NO: 2580833 - RNA, 19 nt, Artificial Sequence
  Description of Artificial Sequence: Synthetic oligonucleotide
  Antisense strand to SEQ ID NO: 2580832
cuaccuagaaaucacagug

SEQ ID NO: 2580834 - RNA, 19 nt, Artificial Sequence
  Description of Artificial Sequence: Synthetic oligonucleotide
  Sense strand starting at position 2556 of SEQ ID NO: 1889138
aacugagcuccuggaagaa

SEQ ID NO: 2580835 - RNA, 19 nt, Artificial Sequence
  Description of Artificial Sequence: Synthetic oligonucleotide
  Antisense strand to SEQ ID NO: 2580834
uucuuccaggagcucaguu

SEQ ID NO: 2580836 - RNA, 19 nt, Artificial Sequence
  Description of Artificial Sequence: Synthetic oligonucleotide
  Sense strand starting at position 2619 of SEQ ID NO: 1889138
acgugaaaggguuguaaua

SEQ ID NO: 2580837 - RNA, 19 nt, Artificial Sequence
  Description of Artificial Sequence: Synthetic oligonucleotide
  Antisense strand to SEQ ID NO: 2580836
uauuacaacccuuucacgu

SEQ ID NO: 2580838 - RNA, 19 nt, Artificial Sequence
  Description of Artificial Sequence: Synthetic oligonucleotide
  Sense strand starting at position 2629 of SEQ ID NO: 1889138
guuguaauagauugagauc

SEQ ID NO: 2580839 - RNA, 19 nt, Artificial Sequence
  Description of Artificial Sequence: Synthetic oligonucleotide
  Antisense strand to SEQ ID NO: 2580838
gaucucaaucuauuacaac

SEQ ID NO: 2580840 - RNA, 19 nt, Artificial Sequence
  Description of Artificial Sequence: Synthetic oligonucleotide
  Sense strand starting at position 2664 of SEQ ID NO: 1889138
gguuagagugguggguuaa

SEQ ID NO: 2580841 - RNA, 19 nt, Artificial Sequence
  Description of Artificial Sequence: Synthetic oligonucleotide
  Antisense strand to SEQ ID NO: 2580840
uuaacccaccacucuaacc

SEQ ID NO: 2580842 - RNA, 19 nt, Artificial Sequence
  Description of Artificial Sequence: Synthetic oligonucleotide
  Sense strand starting at position 2665 of SEQ ID NO: 1889138
guuagagugguggguuaaa

SEQ ID NO: 2580843 - RNA, 19 nt, Artificial Sequence
  Description of Artificial Sequence: Synthetic oligonucleotide
  Antisense strand to SEQ ID NO: 2580842
uuuaacccaccacucuaac

SEQ ID NO: 2580844 - RNA, 19 nt, Artificial Sequence
  Description of Artificial Sequence: Synthetic oligonucleotide
  Sense strand starting at position 2850 of SEQ ID NO: 1889138
agaguucucuuucucaucu

SEQ ID NO: 2580845 - RNA, 19 nt, Artificial Sequence
  Description of Artificial Sequence: Synthetic oligonucleotide
  Antisense strand to SEQ ID NO: 2580844
agaugagaaagagaacucu

SEQ ID NO: 2580846 - RNA, 19 nt, Artificial Sequence
  Description of Artificial Sequence: Synthetic oligonucleotide
  Sense strand starting at position 2900 of SEQ ID NO: 1889138
gauagugauuuauguaaug

SEQ ID NO: 2580847 - RNA, 19 nt, Artificial Sequence
  Description of Artificial Sequence: Synthetic oligonucleotide
  Antisense strand to SEQ ID NO: 2580846
cauuacauaaaucacuauc

SEQ ID NO: 2580848 - RNA, 19 nt, Artificial Sequence
  Description of Artificial Sequence: Synthetic oligonucleotide
  Sense strand starting at position 3095 of SEQ ID NO: 1889138
gggaucaaguaguuauaau

SEQ ID NO: 2580849 - RNA, 19 nt, Artificial Sequence
  Description of Artificial Sequence: Synthetic oligonucleotide
  Antisense strand to SEQ ID NO: 2580848
auuauaacuacuugauccc

SEQ ID NO: 2580850 - RNA, 19 nt, Artificial Sequence
  Description of Artificial Sequence: Synthetic oligonucleotide
  Sense strand starting at position 3403 of SEQ ID NO: 1889138
uagggcuugucaucuucuu

SEQ ID NO: 2580851 - RNA, 19 nt, Artificial Sequence
  Description of Artificial Sequence: Synthetic oligonucleotide
  Antisense strand to SEQ ID NO: 2580850
aagaagaugacaagcccua

SEQ ID NO: 2580852 - RNA, 19 nt, Artificial Sequence
  Description of Artificial Sequence: Synthetic oligonucleotide
  Sense strand starting at position 3434 of SEQ ID NO: 1889138
ggagguguuaucugggcuu

SEQ ID NO: 2580853 - RNA, 19 nt, Artificial Sequence
  Description of Artificial Sequence: Synthetic oligonucleotide
  Antisense strand to SEQ ID NO: 2580852
aagcccagauaacaccucc

SEQ ID NO: 2580854 - RNA, 19 nt, Artificial Sequence
  Description of Artificial Sequence: Synthetic oligonucleotide
  Sense strand starting at position 3494 of SEQ ID NO: 1889138
cuaugauggauccacgcua

SEQ ID NO: 2580855 - RNA, 19 nt, Artificial Sequence
  Description of Artificial Sequence: Synthetic oligonucleotide
  Antisense strand to SEQ ID NO: 2580854
uagcguggauccaucauag

SEQ ID NO: 2580856 - RNA, 19 nt, Artificial Sequence
  Description of Artificial Sequence: Synthetic oligonucleotide
  Sense strand starting at position 3499 of SEQ ID NO: 1889138
auggauccacgcuagaauu

SEQ ID NO: 2580857 - RNA, 19 nt, Artificial Sequence
  Description of Artificial Sequence: Synthetic oligonucleotide
  Antisense strand to SEQ ID NO: 2580856
aauucuagcguggauccau

SEQ ID NO: 2580858 - RNA, 19 nt, Artificial Sequence
  Description of Artificial Sequence: Synthetic oligonucleotide
  Sense strand starting at position 3523 of SEQ ID NO: 1889138
uacauuuguggcuguggga

SEQ ID NO: 2580859 - RNA, 19 nt, Artificial Sequence
  Description of Artificial Sequence: Synthetic oligonucleotide
  Antisense strand to SEQ ID NO: 2580858
ucccacagccacaaaugua

SEQ ID NO: 2580860 - RNA, 19 nt, Artificial Sequence
  Description of Artificial Sequence: Synthetic oligonucleotide
  Sense strand starting at position 3616 of SEQ ID NO: 1889138
cccgaucaucugggaagaa

SEQ ID NO: 2580861 - RNA, 19 nt, Artificial Sequence
  Description of Artificial Sequence: Synthetic oligonucleotide
  Antisense strand to SEQ ID NO: 2580860
uucuucccagaugaucggg

SEQ ID NO: 2580862 - RNA, 19 nt, Artificial Sequence
  Description of Artificial Sequence: Synthetic oligonucleotide
  Sense strand starting at position 3648 of SEQ ID NO: 1889138
ggcugaaauuguuucugua

SEQ ID NO: 2580863 - RNA, 19 nt, Artificial Sequence
  Description of Artificial Sequence: Synthetic oligonucleotide
  Antisense strand to SEQ ID NO: 2580862
uacagaaacaauuucagcc

SEQ ID NO: 2580864 - RNA, 19 nt, Artificial Sequence
  Description of Artificial Sequence: Synthetic oligonucleotide
  Sense strand starting at position 3650 of SEQ ID NO: 1889138
cugaaauuguuucuguaau

SEQ ID NO: 2580865 - RNA, 19 nt, Artificial Sequence
  Description of Artificial Sequence: Synthetic oligonucleotide
  Antisense strand to SEQ ID NO: 2580864
auuacagaaacaauuucag

SEQ ID NO: 2580866 - RNA, 19 nt, Artificial Sequence
  Description of Artificial Sequence: Synthetic oligonucleotide
  Sense strand starting at position 3670 of SEQ ID NO: 1889138
uucccuagagccuguaauu

SEQ ID NO: 2580867 - RNA, 19 nt, Artificial Sequence
  Description of Artificial Sequence: Synthetic oligonucleotide
  Antisense strand to SEQ ID NO: 2580866
aauuacaggcucuagggaa

SEQ ID NO: 2580868 - RNA, 19 nt, Artificial Sequence
  Description of Artificial Sequence: Synthetic oligonucleotide
  Sense strand starting at position 3836 of SEQ ID NO: 1889138
gagcuugugccggcuuuaa

SEQ ID NO: 2580869 - RNA, 19 nt, Artificial Sequence
  Description of Artificial Sequence: Synthetic oligonucleotide
  Antisense strand to SEQ ID NO: 2580868
uuaaagccggcacaagcuc

SEQ ID NO: 2580870 - RNA, 19 nt, Artificial Sequence
  Description of Artificial Sequence: Synthetic oligonucleotide
  Sense strand starting at position 3838 of SEQ ID NO: 1889138
gcuugugccggcuuuaauc

SEQ ID NO: 2580871 - RNA, 19 nt, Artificial Sequence
  Description of Artificial Sequence: Synthetic oligonucleotide
  Antisense strand to SEQ ID NO: 2580870
gauuaaagccggcacaagc

SEQ ID NO: 2580872 - RNA, 19 nt, Artificial Sequence
  Description of Artificial Sequence: Synthetic oligonucleotide
  Sense strand starting at position 37 of SEQ ID NO: 1889139
agcagugaacuuggaacuu

SEQ ID NO: 2580873 - RNA, 19 nt, Artificial Sequence
  Description of Artificial Sequence: Synthetic oligonucleotide
  Antisense strand to SEQ ID NO: 2580872
aaguuccaaguucacugcu

SEQ ID NO: 2580874 - RNA, 19 nt, Artificial Sequence
  Description of Artificial Sequence: Synthetic oligonucleotide
  Sense strand starting at position 459 of SEQ ID NO: 1889139
gcaucuauuggccauugau

SEQ ID NO: 2580875 - RNA, 19 nt, Artificial Sequence
  Description of Artificial Sequence: Synthetic oligonucleotide
  Antisense strand to SEQ ID NO: 2580874
aucaauggccaauagaugc

SEQ ID NO: 2580876 - RNA, 19 nt, Artificial Sequence
  Description of Artificial Sequence: Synthetic oligonucleotide
  Sense strand starting at position 820 of SEQ ID NO: 1889139
gguguuauuauugggaauu

SEQ ID NO: 2580877 - RNA, 19 nt, Artificial Sequence
  Description of Artificial Sequence: Synthetic oligonucleotide
  Antisense strand to SEQ ID NO: 2580876
aauucccaauaauaacacc

SEQ ID NO: 2580878 - RNA, 19 nt, Artificial Sequence
  Description of Artificial Sequence: Synthetic oligonucleotide
  Sense strand starting at position 837 of SEQ ID NO: 1889139
uuuccaucaugguuaaagu

SEQ ID NO: 2580879 - RNA, 19 nt, Artificial Sequence
  Description of Artificial Sequence: Synthetic oligonucleotide
  Antisense strand to SEQ ID NO: 2580878
acuuuaaccaugauggaaa

SEQ ID NO: 2580880 - RNA, 19 nt, Artificial Sequence
  Description of Artificial Sequence: Synthetic oligonucleotide
  Sense strand starting at position 866 of SEQ ID NO: 1889139
caggacuaugggugagcua

SEQ ID NO: 2580881 - RNA, 19 nt, Artificial Sequence
  Description of Artificial Sequence: Synthetic oligonucleotide
  Antisense strand to SEQ ID NO: 2580880
uagcucacccauaguccug

SEQ ID NO: 2580882 - RNA, 19 nt, Artificial Sequence
  Description of Artificial Sequence: Synthetic oligonucleotide
  Sense strand starting at position 867 of SEQ ID NO: 1889139
aggacuaugggugagcuau

SEQ ID NO: 2580883 - RNA, 19 nt, Artificial Sequence
  Description of Artificial Sequence: Synthetic oligonucleotide
  Antisense strand to SEQ ID NO: 2580882
auagcucacccauaguccu

SEQ ID NO: 2580884 - RNA, 19 nt, Artificial Sequence
  Description of Artificial Sequence: Synthetic oligonucleotide
  Sense strand starting at position 875 of SEQ ID NO: 1889139
gggugagcuaucuacuuac

SEQ ID NO: 2580885 - RNA, 19 nt, Artificial Sequence
  Description of Artificial Sequence: Synthetic oligonucleotide
  Antisense strand to SEQ ID NO: 2580884
guaaguagauagcucaccc

SEQ ID NO: 2580886 - RNA, 19 nt, Artificial Sequence
  Description of Artificial Sequence: Synthetic oligonucleotide
  Sense strand starting at position 947 of SEQ ID NO: 1889139
ggccauggugaugacauua

SEQ ID NO: 2580887 - RNA, 19 nt, Artificial Sequence
  Description of Artificial Sequence: Synthetic oligonucleotide
  Antisense strand to SEQ ID NO: 2580886
uaaugucaucaccauggcc

SEQ ID NO: 2580888 - RNA, 19 nt, Artificial Sequence
  Description of Artificial Sequence: Synthetic oligonucleotide
  Sense strand starting at position 983 of SEQ ID NO: 1889139
ggcacaacuguguaagcau

SEQ ID NO: 2580889 - RNA, 19 nt, Artificial Sequence
  Description of Artificial Sequence: Synthetic oligonucleotide
  Antisense strand to SEQ ID NO: 2580888
augcuuacacaguugugcc

SEQ ID NO: 2580890 - RNA, 19 nt, Artificial Sequence
  Description of Artificial Sequence: Synthetic oligonucleotide
  Sense strand starting at position 1365 of SEQ ID NO: 1889139
agcaguauuucgucuuuau

SEQ ID NO: 2580891 - RNA, 19 nt, Artificial Sequence
  Description of Artificial Sequence: Synthetic oligonucleotide
  Antisense strand to SEQ ID NO: 2580890
auaaagacgaaauacugcu

SEQ ID NO: 2580892 - RNA, 19 nt, Artificial Sequence
  Description of Artificial Sequence: Synthetic oligonucleotide
  Sense strand starting at position 1386 of SEQ ID NO: 1889139
ccagguccagcugaaauau

SEQ ID NO: 2580893 - RNA, 19 nt, Artificial Sequence
  Description of Artificial Sequence: Synthetic oligonucleotide
  Antisense strand to SEQ ID NO: 2580892
auauuucagcuggaccugg

SEQ ID NO: 2580894 - RNA, 19 nt, Artificial Sequence
  Description of Artificial Sequence: Synthetic oligonucleotide
  Sense strand starting at position 1741 of SEQ ID NO: 1889139
ccuggaguugcugaugaaa

SEQ ID NO: 2580895 - RNA, 19 nt, Artificial Sequence
  Description of Artificial Sequence: Synthetic oligonucleotide
  Antisense strand to SEQ ID NO: 2580894
uuucaucagcaacuccagg

SEQ ID NO: 2580896 - RNA, 19 nt, Artificial Sequence
  Description of Artificial Sequence: Synthetic oligonucleotide
  Sense strand starting at position 1752 of SEQ ID NO: 1889139
ugaugaaaugccugucauu

SEQ ID NO: 2580897 - RNA, 19 nt, Artificial Sequence
  Description of Artificial Sequence: Synthetic oligonucleotide
  Antisense strand to SEQ ID NO: 2580896
aaugacaggcauuucauca

SEQ ID NO: 2580898 - RNA, 19 nt, Artificial Sequence
  Description of Artificial Sequence: Synthetic oligonucleotide
  Sense strand starting at position 1858 of SEQ ID NO: 1889139
gaaggagucaggugaccuu

SEQ ID NO: 2580899 - RNA, 19 nt, Artificial Sequence
  Description of Artificial Sequence: Synthetic oligonucleotide
  Antisense strand to SEQ ID NO: 2580898
aaggucaccugacuccuuc

SEQ ID NO: 2580900 - RNA, 19 nt, Artificial Sequence
  Description of Artificial Sequence: Synthetic oligonucleotide
  Sense strand starting at position 1911 of SEQ ID NO: 1889139
uugugcugacuuggagaga

SEQ ID NO: 2580901 - RNA, 19 nt, Artificial Sequence
  Description of Artificial Sequence: Synthetic oligonucleotide
  Antisense strand to SEQ ID NO: 2580900
ucucuccaagucagcacaa

SEQ ID NO: 2580902 - RNA, 19 nt, Artificial Sequence
  Description of Artificial Sequence: Synthetic oligonucleotide
  Sense strand starting at position 1928 of SEQ ID NO: 1889139
gaaagcuuagcacacgauu

SEQ ID NO: 2580903 - RNA, 19 nt, Artificial Sequence
  Description of Artificial Sequence: Synthetic oligonucleotide
  Antisense strand to SEQ ID NO: 2580902
aaucgugugcuaagcuuuc

SEQ ID NO: 2580904 - RNA, 19 nt, Artificial Sequence
  Description of Artificial Sequence: Synthetic oligonucleotide
  Sense strand starting at position 1939 of SEQ ID NO: 1889139
acacgauucuggguauaga

SEQ ID NO: 2580905 - RNA, 19 nt, Artificial Sequence
  Description of Artificial Sequence: Synthetic oligonucleotide
  Antisense strand to SEQ ID NO: 2580904
ucuauacccagaaucgugu

SEQ ID NO: 2580906 - RNA, 19 nt, Artificial Sequence
  Description of Artificial Sequence: Synthetic oligonucleotide
  Sense strand starting at position 1999 of SEQ ID NO: 1889139
cugagaacugcagaagcau

SEQ ID NO: 2580907 - RNA, 19 nt, Artificial Sequence
  Description of Artificial Sequence: Synthetic oligonucleotide
  Antisense strand to SEQ ID NO: 2580906
augcuucugcaguucucag

SEQ ID NO: 2580908 - RNA, 19 nt, Artificial Sequence
  Description of Artificial Sequence: Synthetic oligonucleotide
  Sense strand starting at position 2063 of SEQ ID NO: 1889139
accuuaauagcaugaaugu

SEQ ID NO: 2580909 - RNA, 19 nt, Artificial Sequence
  Description of Artificial Sequence: Synthetic oligonucleotide
  Antisense strand to SEQ ID NO: 2580908
acauucaugcuauuaaggu

SEQ ID NO: 2580910 - RNA, 19 nt, Artificial Sequence
  Description of Artificial Sequence: Synthetic oligonucleotide
  Sense strand starting at position 2064 of SEQ ID NO: 1889139
ccuuaauagcaugaaugua

SEQ ID NO: 2580911 - RNA, 19 nt, Artificial Sequence
  Description of Artificial Sequence: Synthetic oligonucleotide
  Antisense strand to SEQ ID NO: 2580910
uacauucaugcuauuaagg

SEQ ID NO: 2580912 - RNA, 19 nt, Artificial Sequence
  Description of Artificial Sequence: Synthetic oligonucleotide
  Sense strand starting at position 2137 of SEQ ID NO: 1889139
uauuaugaguacuuaggau

SEQ ID NO: 2580913 - RNA, 19 nt, Artificial Sequence
  Description of Artificial Sequence: Synthetic oligonucleotide
  Antisense strand to SEQ ID NO: 2580912
auccuaaguacucauaaua

SEQ ID NO: 2580914 - RNA, 19 nt, Artificial Sequence
  Description of Artificial Sequence: Synthetic oligonucleotide
  Sense strand starting at position 2245 of SEQ ID NO: 1889139
acugucucaggguaugaga

SEQ ID NO: 2580915 - RNA, 19 nt, Artificial Sequence
  Description of Artificial Sequence: Synthetic oligonucleotide
  Antisense strand to SEQ ID NO: 2580914
ucucauacccugagacagu

SEQ ID NO: 2580916 - RNA, 19 nt, Artificial Sequence
  Description of Artificial Sequence: Synthetic oligonucleotide
  Sense strand starting at position 2247 of SEQ ID NO: 1889139
ugucucaggguaugagauu

SEQ ID NO: 2580917 - RNA, 19 nt, Artificial Sequence
  Description of Artificial Sequence: Synthetic oligonucleotide
  Antisense strand to SEQ ID NO: 2580916
aaucucauacccugagaca

SEQ ID NO: 2580918 - RNA, 19 nt, Artificial Sequence
  Description of Artificial Sequence: Synthetic oligonucleotide
  Sense strand starting at position 2312 of SEQ ID NO: 1889139
ugaaucuuuccgcauacca

SEQ ID NO: 2580919 - RNA, 19 nt, Artificial Sequence
  Description of Artificial Sequence: Synthetic oligonucleotide
  Antisense strand to SEQ ID NO: 2580918
ugguaugcggaaagauuca

SEQ ID NO: 2580920 - RNA, 19 nt, Artificial Sequence
  Description of Artificial Sequence: Synthetic oligonucleotide
  Sense strand starting at position 2423 of SEQ ID NO: 1889139
gggcuacuacuguacugaa

SEQ ID NO: 2580921 - RNA, 19 nt, Artificial Sequence
  Description of Artificial Sequence: Synthetic oligonucleotide
  Antisense strand to SEQ ID NO: 2580920
uucaguacaguaguagccc

SEQ ID NO: 2580922 - RNA, 19 nt, Artificial Sequence
  Description of Artificial Sequence: Synthetic oligonucleotide
  Sense strand starting at position 2460 of SEQ ID NO: 1889139
aaauaagaugccgguaaac

SEQ ID NO: 2580923 - RNA, 19 nt, Artificial Sequence
  Description of Artificial Sequence: Synthetic oligonucleotide
  Antisense strand to SEQ ID NO: 2580922
guuuaccggcaucuuauuu

SEQ ID NO: 2580924 - RNA, 19 nt, Artificial Sequence
  Description of Artificial Sequence: Synthetic oligonucleotide
  Sense strand starting at position 2462 of SEQ ID NO: 1889139
auaagaugccgguaaacaa

SEQ ID NO: 2580925 - RNA, 19 nt, Artificial Sequence
  Description of Artificial Sequence: Synthetic oligonucleotide
  Antisense strand to SEQ ID NO: 2580924
uuguuuaccggcaucuuau

SEQ ID NO: 2580926 - RNA, 19 nt, Artificial Sequence
  Description of Artificial Sequence: Synthetic oligonucleotide
  Sense strand starting at position 2802 of SEQ ID NO: 1889139
acauuauguccugagcaag

SEQ ID NO: 2580927 - RNA, 19 nt, Artificial Sequence
  Description of Artificial Sequence: Synthetic oligonucleotide
  Antisense strand to SEQ ID NO: 2580926
cuugcucaggacauaaugu

SEQ ID NO: 2580928 - RNA, 19 nt, Artificial Sequence
  Description of Artificial Sequence: Synthetic oligonucleotide
  Sense strand starting at position 2925 of SEQ ID NO: 1889139
ucuugaguugguugauaag

SEQ ID NO: 2580929 - RNA, 19 nt, Artificial Sequence
  Description of Artificial Sequence: Synthetic oligonucleotide
  Antisense strand to SEQ ID NO: 2580928
cuuaucaaccaacucaaga

SEQ ID NO: 2580930 - RNA, 19 nt, Artificial Sequence
  Description of Artificial Sequence: Synthetic oligonucleotide
  Sense strand starting at position 2953 of SEQ ID NO: 1889139
uaagaaaggucagcuaagu

SEQ ID NO: 2580931 - RNA, 19 nt, Artificial Sequence
  Description of Artificial Sequence: Synthetic oligonucleotide
  Antisense strand to SEQ ID NO: 2580930
acuuagcugaccuuucuua

SEQ ID NO: 2580932 - RNA, 19 nt, Artificial Sequence
  Description of Artificial Sequence: Synthetic oligonucleotide
  Sense strand starting at position 3005 of SEQ ID NO: 1889139
cuaauauauuggccuagca

SEQ ID NO: 2580933 - RNA, 19 nt, Artificial Sequence
  Description of Artificial Sequence: Synthetic oligonucleotide
  Antisense strand to SEQ ID NO: 2580932
ugcuaggccaauauauuag

SEQ ID NO: 2580934 - RNA, 19 nt, Artificial Sequence
  Description of Artificial Sequence: Synthetic oligonucleotide
  Sense strand starting at position 3045 of SEQ ID NO: 1889139
gcaggaguguaccugagau

SEQ ID NO: 2580935 - RNA, 19 nt, Artificial Sequence
  Description of Artificial Sequence: Synthetic oligonucleotide
  Antisense strand to SEQ ID NO: 2580934
aucucagguacacuccugc

SEQ ID NO: 2580936 - RNA, 19 nt, Artificial Sequence
  Description of Artificial Sequence: Synthetic oligonucleotide
  Sense strand starting at position 3133 of SEQ ID NO: 1889139
uuguguaaucucuaagguc

SEQ ID NO: 2580937 - RNA, 19 nt, Artificial Sequence
  Description of Artificial Sequence: Synthetic oligonucleotide
  Antisense strand to SEQ ID NO: 2580936
gaccuuagagauuacacaa

SEQ ID NO: 2580938 - RNA, 19 nt, Artificial Sequence
  Description of Artificial Sequence: Synthetic oligonucleotide
  Sense strand starting at position 3217 of SEQ ID NO: 1889139
gucuucugcaaugggaaga

SEQ ID NO: 2580939 - RNA, 19 nt, Artificial Sequence
  Description of Artificial Sequence: Synthetic oligonucleotide
  Antisense strand to SEQ ID NO: 2580938
ucuucccauugcagaagac

SEQ ID NO: 2580940 - RNA, 19 nt, Artificial Sequence
  Description of Artificial Sequence: Synthetic oligonucleotide
  Sense strand starting at position 3625 of SEQ ID NO: 1889139
aguuguaucuuaucaacca

SEQ ID NO: 2580941 - RNA, 19 nt, Artificial Sequence
  Description of Artificial Sequence: Synthetic oligonucleotide
  Antisense strand to SEQ ID NO: 2580940
ugguugauaagauacaacu

SEQ ID NO: 2580942 - RNA, 19 nt, Artificial Sequence
  Description of Artificial Sequence: Synthetic oligonucleotide
  Sense strand starting at position 3654 of SEQ ID NO: 1889139
uggagaccaccugguaaua

SEQ ID NO: 2580943 - RNA, 19 nt, Artificial Sequence
  Description of Artificial Sequence: Synthetic oligonucleotide
  Antisense strand to SEQ ID NO: 2580942
uauuaccagguggucucca

SEQ ID NO: 2580944 - RNA, 19 nt, Artificial Sequence
  Description of Artificial Sequence: Synthetic oligonucleotide
  Sense strand starting at position 3857 of SEQ ID NO: 1889139
uaccaaguaugggcagauu

SEQ ID NO: 2580945 - RNA, 19 nt, Artificial Sequence
  Description of Artificial Sequence: Synthetic oligonucleotide
  Antisense strand to SEQ ID NO: 2580944
aaucugcccauacuuggua

SEQ ID NO: 2580946 - RNA, 19 nt, Artificial Sequence
  Description of Artificial Sequence: Synthetic oligonucleotide
  Sense strand starting at position 3860 of SEQ ID NO: 1889139
caaguaugggcagauucuu

SEQ ID NO: 2580947 - RNA, 19 nt, Artificial Sequence
  Description of Artificial Sequence: Synthetic oligonucleotide
  Antisense strand to SEQ ID NO: 2580946
aagaaucugcccauacuug

SEQ ID NO: 2580948 - RNA, 19 nt, Artificial Sequence
  Description of Artificial Sequence: Synthetic oligonucleotide
  Sense strand starting at position 3865 of SEQ ID NO: 1889139
augggcagauucuugacau

SEQ ID NO: 2580949 - RNA, 19 nt, Artificial Sequence
  Description of Artificial Sequence: Synthetic oligonucleotide
  Antisense strand to SEQ ID NO: 2580948
augucaagaaucugcccau

SEQ ID NO: 2580950 - RNA, 19 nt, Artificial Sequence
  Description of Artificial Sequence: Synthetic oligonucleotide
  Sense strand starting at position 3891 of SEQ ID NO: 1889139
uuggacuacuuacuuuaga

SEQ ID NO: 2580951 - RNA, 19 nt, Artificial Sequence
  Description of Artificial Sequence: Synthetic oligonucleotide
  Antisense strand to SEQ ID NO: 2580950
ucuaaaguaaguaguccaa

SEQ ID NO: 2580952 - RNA, 19 nt, Artificial Sequence
  Description of Artificial Sequence: Synthetic oligonucleotide
  Sense strand starting at position 95 of SEQ ID NO: 1889140
agaaucuguguacaaaugu

SEQ ID NO: 2580953 - RNA, 19 nt, Artificial Sequence
  Description of Artificial Sequence: Synthetic oligonucleotide
  Antisense strand to SEQ ID NO: 2580952
acauuuguacacagauucu

SEQ ID NO: 2580954 - RNA, 19 nt, Artificial Sequence
  Description of Artificial Sequence: Synthetic oligonucleotide
  Sense strand starting at position 560 of SEQ ID NO: 1889140
agaggauaguuaucauuac

SEQ ID NO: 2580955 - RNA, 19 nt, Artificial Sequence
  Description of Artificial Sequence: Synthetic oligonucleotide
  Antisense strand to SEQ ID NO: 2580954
guaaugauaacuauccucu

SEQ ID NO: 2580956 - RNA, 19 nt, Artificial Sequence
  Description of Artificial Sequence: Synthetic oligonucleotide
  Sense strand starting at position 666 of SEQ ID NO: 1889140
cguuacauuuaucuggagu

SEQ ID NO: 2580957 - RNA, 19 nt, Artificial Sequence
  Description of Artificial Sequence: Synthetic oligonucleotide
  Antisense strand to SEQ ID NO: 2580956
acuccagauaaauguaacg

SEQ ID NO: 2580958 - RNA, 19 nt, Artificial Sequence
  Description of Artificial Sequence: Synthetic oligonucleotide
  Sense strand starting at position 856 of SEQ ID NO: 1889140
accauaagaugucuuagua

SEQ ID NO: 2580959 - RNA, 19 nt, Artificial Sequence
  Description of Artificial Sequence: Synthetic oligonucleotide
  Antisense strand to SEQ ID NO: 2580958
uacuaagacaucuuauggu

SEQ ID NO: 2580960 - RNA, 19 nt, Artificial Sequence
  Description of Artificial Sequence: Synthetic oligonucleotide
  Sense strand starting at position 868 of SEQ ID NO: 1889140
cuuaguaacguauaagaaa

SEQ ID NO: 2580961 - RNA, 19 nt, Artificial Sequence
  Description of Artificial Sequence: Synthetic oligonucleotide
  Antisense strand to SEQ ID NO: 2580960
uuucuuauacguuacuaag

SEQ ID NO: 2580962 - RNA, 19 nt, Artificial Sequence
  Description of Artificial Sequence: Synthetic oligonucleotide
  Sense strand starting at position 951 of SEQ ID NO: 1889140
gucagaaagcaagagcuau

SEQ ID NO: 2580963 - RNA, 19 nt, Artificial Sequence
  Description of Artificial Sequence: Synthetic oligonucleotide
  Antisense strand to SEQ ID NO: 2580962
auagcucuugcuuucugac

SEQ ID NO: 2580964 - RNA, 19 nt, Artificial Sequence
  Description of Artificial Sequence: Synthetic oligonucleotide
  Sense strand starting at position 1027 of SEQ ID NO: 1889140
uuaaauugguaguugauga

SEQ ID NO: 2580965 - RNA, 19 nt, Artificial Sequence
  Description of Artificial Sequence: Synthetic oligonucleotide
  Antisense strand to SEQ ID NO: 2580964
ucaucaacuaccaauuuaa

SEQ ID NO: 2580966 - RNA, 19 nt, Artificial Sequence
  Description of Artificial Sequence: Synthetic oligonucleotide
  Sense strand starting at position 1064 of SEQ ID NO: 1889140
cagccuagauagguggaua

SEQ ID NO: 2580967 - RNA, 19 nt, Artificial Sequence
  Description of Artificial Sequence: Synthetic oligonucleotide
  Antisense strand to SEQ ID NO: 2580966
uauccaccuaucuaggcug

SEQ ID NO: 2580968 - RNA, 19 nt, Artificial Sequence
  Description of Artificial Sequence: Synthetic oligonucleotide
  Sense strand starting at position 1065 of SEQ ID NO: 1889140
agccuagauagguggauau

SEQ ID NO: 2580969 - RNA, 19 nt, Artificial Sequence
  Description of Artificial Sequence: Synthetic oligonucleotide
  Antisense strand to SEQ ID NO: 2580968
auauccaccuaucuaggcu

SEQ ID NO: 2580970 - RNA, 19 nt, Artificial Sequence
  Description of Artificial Sequence: Synthetic oligonucleotide
  Sense strand starting at position 1244 of SEQ ID NO: 1889140
aagaccuugccauaaguga

SEQ ID NO: 2580971 - RNA, 19 nt, Artificial Sequence
  Description of Artificial Sequence: Synthetic oligonucleotide
  Antisense strand to SEQ ID NO: 2580970
ucacuuauggcaaggucuu

SEQ ID NO: 2580972 - RNA, 19 nt, Artificial Sequence
  Description of Artificial Sequence: Synthetic oligonucleotide
  Sense strand starting at position 1405 of SEQ ID NO: 1889140
guccauucucauugggaga

SEQ ID NO: 2580973 - RNA, 19 nt, Artificial Sequence
  Description of Artificial Sequence: Synthetic oligonucleotide
  Antisense strand to SEQ ID NO: 2580972
ucucccaaugagaauggac

SEQ ID NO: 2580974 - RNA, 19 nt, Artificial Sequence
  Description of Artificial Sequence: Synthetic oligonucleotide
  Sense strand starting at position 1438 of SEQ ID NO: 1889140
accaauaaacuugguaagu

SEQ ID NO: 2580975 - RNA, 19 nt, Artificial Sequence
  Description of Artificial Sequence: Synthetic oligonucleotide
  Antisense strand to SEQ ID NO: 2580974
acuuaccaaguuuauuggu

SEQ ID NO: 2580976 - RNA, 19 nt, Artificial Sequence
  Description of Artificial Sequence: Synthetic oligonucleotide
  Sense strand starting at position 1439 of SEQ ID NO: 1889140
ccaauaaacuugguaagua

SEQ ID NO: 2580977 - RNA, 19 nt, Artificial Sequence
  Description of Artificial Sequence: Synthetic oligonucleotide
  Antisense strand to SEQ ID NO: 2580976
uacuuaccaaguuuauugg

SEQ ID NO: 2580978 - RNA, 19 nt, Artificial Sequence
  Description of Artificial Sequence: Synthetic oligonucleotide
  Sense strand starting at position 1470 of SEQ ID NO: 1889140
ucuuaaaugcuaugggaaa

SEQ ID NO: 2580979 - RNA, 19 nt, Artificial Sequence
  Description of Artificial Sequence: Synthetic oligonucleotide
  Antisense strand to SEQ ID NO: 2580978
uuucccauagcauuuaaga

SEQ ID NO: 2580980 - RNA, 19 nt, Artificial Sequence
  Description of Artificial Sequence: Synthetic oligonucleotide
  Sense strand starting at position 1477 of SEQ ID NO: 1889140
ugcuaugggaaacgauaaa

SEQ ID NO: 2580981 - RNA, 19 nt, Artificial Sequence
  Description of Artificial Sequence: Synthetic oligonucleotide
  Antisense strand to SEQ ID NO: 2580980
uuuaucguuucccauagca

SEQ ID NO: 2580982 - RNA, 19 nt, Artificial Sequence
  Description of Artificial Sequence: Synthetic oligonucleotide
  Sense strand starting at position 1567 of SEQ ID NO: 1889140
ggcagaccucucugagaag

SEQ ID NO: 2580983 - RNA, 19 nt, Artificial Sequence
  Description of Artificial Sequence: Synthetic oligonucleotide
  Antisense strand to SEQ ID NO: 2580982
cuucucagagaggucugcc

SEQ ID NO: 2580984 - RNA, 19 nt, Artificial Sequence
  Description of Artificial Sequence: Synthetic oligonucleotide
  Sense strand starting at position 1585 of SEQ ID NO: 1889140
ggugacauaugaguaaaua

SEQ ID NO: 2580985 - RNA, 19 nt, Artificial Sequence
  Description of Artificial Sequence: Synthetic oligonucleotide
  Antisense strand to SEQ ID NO: 2580984
uauuuacucauaugucacc

SEQ ID NO: 2580986 - RNA, 19 nt, Artificial Sequence
  Description of Artificial Sequence: Synthetic oligonucleotide
  Sense strand starting at position 1620 of SEQ ID NO: 1889140
ggaagugagccaugagaac

SEQ ID NO: 2580987 - RNA, 19 nt, Artificial Sequence
  Description of Artificial Sequence: Synthetic oligonucleotide
  Antisense strand to SEQ ID NO: 2580986
guucucauggcucacuucc

SEQ ID NO: 2580988 - RNA, 19 nt, Artificial Sequence
  Description of Artificial Sequence: Synthetic oligonucleotide
  Sense strand starting at position 1639 of SEQ ID NO: 1889140
agggaauucuggucgaauu

SEQ ID NO: 2580989 - RNA, 19 nt, Artificial Sequence
  Description of Artificial Sequence: Synthetic oligonucleotide
  Antisense strand to SEQ ID NO: 2580988
aauucgaccagaauucccu

SEQ ID NO: 2580990 - RNA, 19 nt, Artificial Sequence
  Description of Artificial Sequence: Synthetic oligonucleotide
  Sense strand starting at position 1670 of SEQ ID NO: 1889140
cccuaauacugaguauaga

SEQ ID NO: 2580991 - RNA, 19 nt, Artificial Sequence
  Description of Artificial Sequence: Synthetic oligonucleotide
  Antisense strand to SEQ ID NO: 2580990
ucuauacucaguauuaggg

SEQ ID NO: 2580992 - RNA, 19 nt, Artificial Sequence
  Description of Artificial Sequence: Synthetic oligonucleotide
  Sense strand starting at position 1678 of SEQ ID NO: 1889140
cugaguauagaugguuaau

SEQ ID NO: 2580993 - RNA, 19 nt, Artificial Sequence
  Description of Artificial Sequence: Synthetic oligonucleotide
  Antisense strand to SEQ ID NO: 2580992
auuaaccaucuauacucag

SEQ ID NO: 2580994 - RNA, 19 nt, Artificial Sequence
  Description of Artificial Sequence: Synthetic oligonucleotide
  Sense strand starting at position 1680 of SEQ ID NO: 1889140
gaguauagaugguuaauaa

SEQ ID NO: 2580995 - RNA, 19 nt, Artificial Sequence
  Description of Artificial Sequence: Synthetic oligonucleotide
  Antisense strand to SEQ ID NO: 2580994
uuauuaaccaucuauacuc

SEQ ID NO: 2580996 - RNA, 19 nt, Artificial Sequence
  Description of Artificial Sequence: Synthetic oligonucleotide
  Sense strand starting at position 1932 of SEQ ID NO: 1889140
ugaucuguccuccauggaa

SEQ ID NO: 2580997 - RNA, 19 nt, Artificial Sequence
  Description of Artificial Sequence: Synthetic oligonucleotide
  Antisense strand to SEQ ID NO: 2580996
uuccauggaggacagauca

SEQ ID NO: 2580998 - RNA, 19 nt, Artificial Sequence
  Description of Artificial Sequence: Synthetic oligonucleotide
  Sense strand starting at position 2115 of SEQ ID NO: 1889140
gagauuucuucuguugcuu

SEQ ID NO: 2580999 - RNA, 19 nt, Artificial Sequence
  Description of Artificial Sequence: Synthetic oligonucleotide
  Antisense strand to SEQ ID NO: 2580998
aagcaacagaagaaaucuc

SEQ ID NO: 2581000 - RNA, 19 nt, Artificial Sequence
  Description of Artificial Sequence: Synthetic oligonucleotide
  Sense strand starting at position 2370 of SEQ ID NO: 1889140
gguagcuauguugaaauaa

SEQ ID NO: 2581001 - RNA, 19 nt, Artificial Sequence
  Description of Artificial Sequence: Synthetic oligonucleotide
  Antisense strand to SEQ ID NO: 2581000
uuauuucaacauagcuacc

SEQ ID NO: 2581002 - RNA, 19 nt, Artificial Sequence
  Description of Artificial Sequence: Synthetic oligonucleotide
  Sense strand starting at position 2507 of SEQ ID NO: 1889140
aaaguaauggcaugggaau

SEQ ID NO: 2581003 - RNA, 19 nt, Artificial Sequence
  Description of Artificial Sequence: Synthetic oligonucleotide
  Antisense strand to SEQ ID NO: 2581002
auucccaugccauuacuuu

SEQ ID NO: 2581004 - RNA, 19 nt, Artificial Sequence
  Description of Artificial Sequence: Synthetic oligonucleotide
  Sense strand starting at position 2508 of SEQ ID NO: 1889140
aaguaauggcaugggaauc

SEQ ID NO: 2581005 - RNA, 19 nt, Artificial Sequence
  Description of Artificial Sequence: Synthetic oligonucleotide
  Antisense strand to SEQ ID NO: 2581004
gauucccaugccauuacuu

SEQ ID NO: 2581006 - RNA, 19 nt, Artificial Sequence
  Description of Artificial Sequence: Synthetic oligonucleotide
  Sense strand starting at position 2604 of SEQ ID NO: 1889140
ugauauguuuaaucaucag

SEQ ID NO: 2581007 - RNA, 19 nt, Artificial Sequence
  Description of Artificial Sequence: Synthetic oligonucleotide
  Antisense strand to SEQ ID NO: 2581006
cugaugauuaaacauauca

SEQ ID NO: 2581008 - RNA, 19 nt, Artificial Sequence
  Description of Artificial Sequence: Synthetic oligonucleotide
  Sense strand starting at position 2650 of SEQ ID NO: 1889140
uuauaaugacuguaguaac

SEQ ID NO: 2581009 - RNA, 19 nt, Artificial Sequence
  Description of Artificial Sequence: Synthetic oligonucleotide
  Antisense strand to SEQ ID NO: 2581008
guuacuacagucauuauaa

SEQ ID NO: 2581010 - RNA, 19 nt, Artificial Sequence
  Description of Artificial Sequence: Synthetic oligonucleotide
  Sense strand starting at position 2705 of SEQ ID NO: 1889140
uuuaguuucucauuugagu

SEQ ID NO: 2581011 - RNA, 19 nt, Artificial Sequence
  Description of Artificial Sequence: Synthetic oligonucleotide
  Antisense strand to SEQ ID NO: 2581010
acucaaaugagaaacuaaa

SEQ ID NO: 2581012 - RNA, 19 nt, Artificial Sequence
  Description of Artificial Sequence: Synthetic oligonucleotide
  Sense strand starting at position 2724 of SEQ ID NO: 1889140
cccuuaauaucucuggaag

SEQ ID NO: 2581013 - RNA, 19 nt, Artificial Sequence
  Description of Artificial Sequence: Synthetic oligonucleotide
  Antisense strand to SEQ ID NO: 2581012
cuuccagagauauuaaggg

SEQ ID NO: 2581014 - RNA, 19 nt, Artificial Sequence
  Description of Artificial Sequence: Synthetic oligonucleotide
  Sense strand starting at position 2725 of SEQ ID NO: 1889140
ccuuaauaucucuggaagg

SEQ ID NO: 2581015 - RNA, 19 nt, Artificial Sequence
  Description of Artificial Sequence: Synthetic oligonucleotide
  Antisense strand to SEQ ID NO: 2581014
ccuuccagagauauuaagg

SEQ ID NO: 2581016 - RNA, 19 nt, Artificial Sequence
  Description of Artificial Sequence: Synthetic oligonucleotide
  Sense strand starting at position 2730 of SEQ ID NO: 1889140
auaucucuggaagguagau

SEQ ID NO: 2581017 - RNA, 19 nt, Artificial Sequence
  Description of Artificial Sequence: Synthetic oligonucleotide
  Antisense strand to SEQ ID NO: 2581016
aucuaccuuccagagauau

SEQ ID NO: 2581018 - RNA, 19 nt, Artificial Sequence
  Description of Artificial Sequence: Synthetic oligonucleotide
  Sense strand starting at position 2745 of SEQ ID NO: 1889140
agauaauguguggaguuau

SEQ ID NO: 2581019 - RNA, 19 nt, Artificial Sequence
  Description of Artificial Sequence: Synthetic oligonucleotide
  Antisense strand to SEQ ID NO: 2581018
auaacuccacacauuaucu

SEQ ID NO: 2581020 - RNA, 19 nt, Artificial Sequence
  Description of Artificial Sequence: Synthetic oligonucleotide
  Sense strand starting at position 2842 of SEQ ID NO: 1889140
ggaauccaguucuccuuaa

SEQ ID NO: 2581021 - RNA, 19 nt, Artificial Sequence
  Description of Artificial Sequence: Synthetic oligonucleotide
  Antisense strand to SEQ ID NO: 2581020
uuaaggagaacuggauucc

SEQ ID NO: 2581022 - RNA, 19 nt, Artificial Sequence
  Description of Artificial Sequence: Synthetic oligonucleotide
  Sense strand starting at position 3089 of SEQ ID NO: 1889140
cuauuauuaugagcaagag

SEQ ID NO: 2581023 - RNA, 19 nt, Artificial Sequence
  Description of Artificial Sequence: Synthetic oligonucleotide
  Antisense strand to SEQ ID NO: 2581022
cucuugcucauaauaauag

SEQ ID NO: 2581024 - RNA, 19 nt, Artificial Sequence
  Description of Artificial Sequence: Synthetic oligonucleotide
  Sense strand starting at position 3339 of SEQ ID NO: 1889140
gacuuacuggugcaaguaa

SEQ ID NO: 2581025 - RNA, 19 nt, Artificial Sequence
  Description of Artificial Sequence: Synthetic oligonucleotide
  Antisense strand to SEQ ID NO: 2581024
uuacuugcaccaguaaguc

SEQ ID NO: 2581026 - RNA, 19 nt, Artificial Sequence
  Description of Artificial Sequence: Synthetic oligonucleotide
  Sense strand starting at position 3467 of SEQ ID NO: 1889140
auuaucaaguaguuccaaa

SEQ ID NO: 2581027 - RNA, 19 nt, Artificial Sequence
  Description of Artificial Sequence: Synthetic oligonucleotide
  Antisense strand to SEQ ID NO: 2581026
uuuggaacuacuugauaau

SEQ ID NO: 2581028 - RNA, 19 nt, Artificial Sequence
  Description of Artificial Sequence: Synthetic oligonucleotide
  Sense strand starting at position 3706 of SEQ ID NO: 1889140
auuaguaagcuauauagac

SEQ ID NO: 2581029 - RNA, 19 nt, Artificial Sequence
  Description of Artificial Sequence: Synthetic oligonucleotide
  Antisense strand to SEQ ID NO: 2581028
gucuauauagcuuacuaau

SEQ ID NO: 2581030 - RNA, 19 nt, Artificial Sequence
  Description of Artificial Sequence: Synthetic oligonucleotide
  Sense strand starting at position 3723 of SEQ ID NO: 1889140
acucauucucaaggaggua

SEQ ID NO: 2581031 - RNA, 19 nt, Artificial Sequence
  Description of Artificial Sequence: Synthetic oligonucleotide
  Antisense strand to SEQ ID NO: 2581030
uaccuccuugagaaugagu

SEQ ID NO: 2581032 - RNA, 19 nt, Artificial Sequence
  Description of Artificial Sequence: Synthetic oligonucleotide
  Sense strand starting at position 46 of SEQ ID NO: 1889141
cuguauccagguuauguga

SEQ ID NO: 2581033 - RNA, 19 nt, Artificial Sequence
  Description of Artificial Sequence: Synthetic oligonucleotide
  Antisense strand to SEQ ID NO: 2581032
ucacauaaccuggauacag

SEQ ID NO: 2581034 - RNA, 19 nt, Artificial Sequence
  Description of Artificial Sequence: Synthetic oligonucleotide
  Sense strand starting at position 86 of SEQ ID NO: 1889141
ugcagaggagauuguaaua

SEQ ID NO: 2581035 - RNA, 19 nt, Artificial Sequence
  Description of Artificial Sequence: Synthetic oligonucleotide
  Antisense strand to SEQ ID NO: 2581034
uauuacaaucuccucugca

SEQ ID NO: 2581036 - RNA, 19 nt, Artificial Sequence
  Description of Artificial Sequence: Synthetic oligonucleotide
  Sense strand starting at position 99 of SEQ ID NO: 1889141
guaauauauccugagcuca

SEQ ID NO: 2581037 - RNA, 19 nt, Artificial Sequence
  Description of Artificial Sequence: Synthetic oligonucleotide
  Antisense strand to SEQ ID NO: 2581036
ugagcucaggauauauuac

SEQ ID NO: 2581038 - RNA, 19 nt, Artificial Sequence
  Description of Artificial Sequence: Synthetic oligonucleotide
  Sense strand starting at position 188 of SEQ ID NO: 1889141
agcucacaugcagaaauau

SEQ ID NO: 2581039 - RNA, 19 nt, Artificial Sequence
  Description of Artificial Sequence: Synthetic oligonucleotide
  Antisense strand to SEQ ID NO: 2581038
auauuucugcaugugagcu

SEQ ID NO: 2581040 - RNA, 19 nt, Artificial Sequence
  Description of Artificial Sequence: Synthetic oligonucleotide
  Sense strand starting at position 256 of SEQ ID NO: 1889141
cagucauggcaauaaguaa

SEQ ID NO: 2581041 - RNA, 19 nt, Artificial Sequence
  Description of Artificial Sequence: Synthetic oligonucleotide
  Antisense strand to SEQ ID NO: 2581040
uuacuuauugccaugacug

SEQ ID NO: 2581042 - RNA, 19 nt, Artificial Sequence
  Description of Artificial Sequence: Synthetic oligonucleotide
  Sense strand starting at position 285 of SEQ ID NO: 1889141
cuccuaauuguauaaaguu

SEQ ID NO: 2581043 - RNA, 19 nt, Artificial Sequence
  Description of Artificial Sequence: Synthetic oligonucleotide
  Antisense strand to SEQ ID NO: 2581042
aacuuuauacaauuaggag

SEQ ID NO: 2581044 - RNA, 19 nt, Artificial Sequence
  Description of Artificial Sequence: Synthetic oligonucleotide
  Sense strand starting at position 530 of SEQ ID NO: 1889141
gugucauuugcugaugcau

SEQ ID NO: 2581045 - RNA, 19 nt, Artificial Sequence
  Description of Artificial Sequence: Synthetic oligonucleotide
  Antisense strand to SEQ ID NO: 2581044
augcaucagcaaaugacac

SEQ ID NO: 2581046 - RNA, 19 nt, Artificial Sequence
  Description of Artificial Sequence: Synthetic oligonucleotide
  Sense strand starting at position 569 of SEQ ID NO: 1889141
augugacuccucuagugga

SEQ ID NO: 2581047 - RNA, 19 nt, Artificial Sequence
  Description of Artificial Sequence: Synthetic oligonucleotide
  Antisense strand to SEQ ID NO: 2581046
uccacuagaggagucacau

SEQ ID NO: 2581048 - RNA, 19 nt, Artificial Sequence
  Description of Artificial Sequence: Synthetic oligonucleotide
  Sense strand starting at position 635 of SEQ ID NO: 1889141
auuguuauuguugagauug

SEQ ID NO: 2581049 - RNA, 19 nt, Artificial Sequence
  Description of Artificial Sequence: Synthetic oligonucleotide
  Antisense strand to SEQ ID NO: 2581048
caaucucaacaauaacaau

SEQ ID NO: 2581050 - RNA, 19 nt, Artificial Sequence
  Description of Artificial Sequence: Synthetic oligonucleotide
  Sense strand starting at position 708 of SEQ ID NO: 1889141
ccaggacuucugcaggacu

SEQ ID NO: 2581051 - RNA, 19 nt, Artificial Sequence
  Description of Artificial Sequence: Synthetic oligonucleotide
  Antisense strand to SEQ ID NO: 2581050
aguccugcagaaguccugg

SEQ ID NO: 2581052 - RNA, 19 nt, Artificial Sequence
  Description of Artificial Sequence: Synthetic oligonucleotide
  Sense strand starting at position 710 of SEQ ID NO: 1889141
aggacuucugcaggacuau

SEQ ID NO: 2581053 - RNA, 19 nt, Artificial Sequence
  Description of Artificial Sequence: Synthetic oligonucleotide
  Antisense strand to SEQ ID NO: 2581052
auaguccugcagaaguccu

SEQ ID NO: 2581054 - RNA, 19 nt, Artificial Sequence
  Description of Artificial Sequence: Synthetic oligonucleotide
  Sense strand starting at position 809 of SEQ ID NO: 1889141
uuagguuaugacuagugau

SEQ ID NO: 2581055 - RNA, 19 nt, Artificial Sequence
  Description of Artificial Sequence: Synthetic oligonucleotide
  Antisense strand to SEQ ID NO: 2581054
aucacuagucauaaccuaa

SEQ ID NO: 2581056 - RNA, 19 nt, Artificial Sequence
  Description of Artificial Sequence: Synthetic oligonucleotide
  Sense strand starting at position 833 of SEQ ID NO: 1889141
ugugauauacauggaucau

SEQ ID NO: 2581057 - RNA, 19 nt, Artificial Sequence
  Description of Artificial Sequence: Synthetic oligonucleotide
  Antisense strand to SEQ ID NO: 2581056
augauccauguauaucaca

SEQ ID NO: 2581058 - RNA, 19 nt, Artificial Sequence
  Description of Artificial Sequence: Synthetic oligonucleotide
  Sense strand starting at position 896 of SEQ ID NO: 1889141
uaaguaucacugggaucag

SEQ ID NO: 2581059 - RNA, 19 nt, Artificial Sequence
  Description of Artificial Sequence: Synthetic oligonucleotide
  Antisense strand to SEQ ID NO: 2581058
cugaucccagugauacuua

SEQ ID NO: 2581060 - RNA, 19 nt, Artificial Sequence
  Description of Artificial Sequence: Synthetic oligonucleotide
  Sense strand starting at position 971 of SEQ ID NO: 1889141
agauauauguggcuuauau

SEQ ID NO: 2581061 - RNA, 19 nt, Artificial Sequence
  Description of Artificial Sequence: Synthetic oligonucleotide
  Antisense strand to SEQ ID NO: 2581060
auauaagccacauauaucu

SEQ ID NO: 2581062 - RNA, 19 nt, Artificial Sequence
  Description of Artificial Sequence: Synthetic oligonucleotide
  Sense strand starting at position 992 of SEQ ID NO: 1889141
agguccauuguguaaguga

SEQ ID NO: 2581063 - RNA, 19 nt, Artificial Sequence
  Description of Artificial Sequence: Synthetic oligonucleotide
  Antisense strand to SEQ ID NO: 2581062
ucacuuacacaauggaccu

SEQ ID NO: 2581064 - RNA, 19 nt, Artificial Sequence
  Description of Artificial Sequence: Synthetic oligonucleotide
  Sense strand starting at position 997 of SEQ ID NO: 1889141
cauuguguaagugauguga

SEQ ID NO: 2581065 - RNA, 19 nt, Artificial Sequence
  Description of Artificial Sequence: Synthetic oligonucleotide
  Antisense strand to SEQ ID NO: 2581064
ucacaucacuuacacaaug

SEQ ID NO: 2581066 - RNA, 19 nt, Artificial Sequence
  Description of Artificial Sequence: Synthetic oligonucleotide
  Sense strand starting at position 1240 of SEQ ID NO: 1889141
cauagcagccauugagaca

SEQ ID NO: 2581067 - RNA, 19 nt, Artificial Sequence
  Description of Artificial Sequence: Synthetic oligonucleotide
  Antisense strand to SEQ ID NO: 2581066
ugucucaauggcugcuaug

SEQ ID NO: 2581068 - RNA, 19 nt, Artificial Sequence
  Description of Artificial Sequence: Synthetic oligonucleotide
  Sense strand starting at position 1631 of SEQ ID NO: 1889141
uuagguauaguccacaaau

SEQ ID NO: 2581069 - RNA, 19 nt, Artificial Sequence
  Description of Artificial Sequence: Synthetic oligonucleotide
  Antisense strand to SEQ ID NO: 2581068
auuuguggacuauaccuaa

SEQ ID NO: 2581070 - RNA, 19 nt, Artificial Sequence
  Description of Artificial Sequence: Synthetic oligonucleotide
  Sense strand starting at position 1646 of SEQ ID NO: 1889141
aaaugagauuuggacguau

SEQ ID NO: 2581071 - RNA, 19 nt, Artificial Sequence
  Description of Artificial Sequence: Synthetic oligonucleotide
  Antisense strand to SEQ ID NO: 2581070
auacguccaaaucucauuu

SEQ ID NO: 2581072 - RNA, 19 nt, Artificial Sequence
  Description of Artificial Sequence: Synthetic oligonucleotide
  Sense strand starting at position 1670 of SEQ ID NO: 1889141
agcugaucaccacagugau

SEQ ID NO: 2581073 - RNA, 19 nt, Artificial Sequence
  Description of Artificial Sequence: Synthetic oligonucleotide
  Antisense strand to SEQ ID NO: 2581072
aucacuguggugaucagcu

SEQ ID NO: 2581074 - RNA, 19 nt, Artificial Sequence
  Description of Artificial Sequence: Synthetic oligonucleotide
  Sense strand starting at position 2007 of SEQ ID NO: 1889141
aggagaauauuggcacauu

SEQ ID NO: 2581075 - RNA, 19 nt, Artificial Sequence
  Description of Artificial Sequence: Synthetic oligonucleotide
  Antisense strand to SEQ ID NO: 2581074
aaugugccaauauucuccu

SEQ ID NO: 2581076 - RNA, 19 nt, Artificial Sequence
  Description of Artificial Sequence: Synthetic oligonucleotide
  Sense strand starting at position 2008 of SEQ ID NO: 1889141
ggagaauauuggcacauuu

SEQ ID NO: 2581077 - RNA, 19 nt, Artificial Sequence
  Description of Artificial Sequence: Synthetic oligonucleotide
  Antisense strand to SEQ ID NO: 2581076
aaaugugccaauauucucc

SEQ ID NO: 2581078 - RNA, 19 nt, Artificial Sequence
  Description of Artificial Sequence: Synthetic oligonucleotide
  Sense strand starting at position 2112 of SEQ ID NO: 1889141
gcaugauaaugacucuuac

SEQ ID NO: 2581079 - RNA, 19 nt, Artificial Sequence
  Description of Artificial Sequence: Synthetic oligonucleotide
  Antisense strand to SEQ ID NO: 2581078
guaagagucauuaucaugc

SEQ ID NO: 2581080 - RNA, 19 nt, Artificial Sequence
  Description of Artificial Sequence: Synthetic oligonucleotide
  Sense strand starting at position 2265 of SEQ ID NO: 1889141
uuggacagagagugucaua

SEQ ID NO: 2581081 - RNA, 19 nt, Artificial Sequence
  Description of Artificial Sequence: Synthetic oligonucleotide
  Antisense strand to SEQ ID NO: 2581080
uaugacacucucuguccaa

SEQ ID NO: 2581082 - RNA, 19 nt, Artificial Sequence
  Description of Artificial Sequence: Synthetic oligonucleotide
  Sense strand starting at position 2300 of SEQ ID NO: 1889141
aggugaaauuaucucauau

SEQ ID NO: 2581083 - RNA, 19 nt, Artificial Sequence
  Description of Artificial Sequence: Synthetic oligonucleotide
  Antisense strand to SEQ ID NO: 2581082
auaugagauaauuucaccu

SEQ ID NO: 2581084 - RNA, 19 nt, Artificial Sequence
  Description of Artificial Sequence: Synthetic oligonucleotide
  Sense strand starting at position 2366 of SEQ ID NO: 1889141
ccaacuguugcucaugaua

SEQ ID NO: 2581085 - RNA, 19 nt, Artificial Sequence
  Description of Artificial Sequence: Synthetic oligonucleotide
  Antisense strand to SEQ ID NO: 2581084
uaucaugagcaacaguugg

SEQ ID NO: 2581086 - RNA, 19 nt, Artificial Sequence
  Description of Artificial Sequence: Synthetic oligonucleotide
  Sense strand starting at position 2385 of SEQ ID NO: 1889141
aaaggacaugugugguauu

SEQ ID NO: 2581087 - RNA, 19 nt, Artificial Sequence
  Description of Artificial Sequence: Synthetic oligonucleotide
  Antisense strand to SEQ ID NO: 2581086
aauaccacacauguccuuu

SEQ ID NO: 2581088 - RNA, 19 nt, Artificial Sequence
  Description of Artificial Sequence: Synthetic oligonucleotide
  Sense strand starting at position 2470 of SEQ ID NO: 1889141
ugaucugacucuccagacu

SEQ ID NO: 2581089 - RNA, 19 nt, Artificial Sequence
  Description of Artificial Sequence: Synthetic oligonucleotide
  Antisense strand to SEQ ID NO: 2581088
agucuggagagucagauca

SEQ ID NO: 2581090 - RNA, 19 nt, Artificial Sequence
  Description of Artificial Sequence: Synthetic oligonucleotide
  Sense strand starting at position 2581 of SEQ ID NO: 1889141
agugauauaucacuagauc

SEQ ID NO: 2581091 - RNA, 19 nt, Artificial Sequence
  Description of Artificial Sequence: Synthetic oligonucleotide
  Antisense strand to SEQ ID NO: 2581090
gaucuagugauauaucacu

SEQ ID NO: 2581092 - RNA, 19 nt, Artificial Sequence
  Description of Artificial Sequence: Synthetic oligonucleotide
  Sense strand starting at position 2640 of SEQ ID NO: 1889141
cacagaagucauugugaca

SEQ ID NO: 2581093 - RNA, 19 nt, Artificial Sequence
  Description of Artificial Sequence: Synthetic oligonucleotide
  Antisense strand to SEQ ID NO: 2581092
ugucacaaugacuucugug

SEQ ID NO: 2581094 - RNA, 19 nt, Artificial Sequence
  Description of Artificial Sequence: Synthetic oligonucleotide
  Sense strand starting at position 2653 of SEQ ID NO: 1889141
gugacauaucacuguauca

SEQ ID NO: 2581095 - RNA, 19 nt, Artificial Sequence
  Description of Artificial Sequence: Synthetic oligonucleotide
  Antisense strand to SEQ ID NO: 2581094
ugauacagugauaugucac

SEQ ID NO: 2581096 - RNA, 19 nt, Artificial Sequence
  Description of Artificial Sequence: Synthetic oligonucleotide
  Sense strand starting at position 2803 of SEQ ID NO: 1889141
ugacaaauaccuuggccua

SEQ ID NO: 2581097 - RNA, 19 nt, Artificial Sequence
  Description of Artificial Sequence: Synthetic oligonucleotide
  Antisense strand to SEQ ID NO: 2581096
uaggccaagguauuuguca

SEQ ID NO: 2581098 - RNA, 19 nt, Artificial Sequence
  Description of Artificial Sequence: Synthetic oligonucleotide
  Sense strand starting at position 2923 of SEQ ID NO: 1889141
augucucaaggaggauauu

SEQ ID NO: 2581099 - RNA, 19 nt, Artificial Sequence
  Description of Artificial Sequence: Synthetic oligonucleotide
  Antisense strand to SEQ ID NO: 2581098
aauauccuccuugagacau

SEQ ID NO: 2581100 - RNA, 19 nt, Artificial Sequence
  Description of Artificial Sequence: Synthetic oligonucleotide
  Sense strand starting at position 2989 of SEQ ID NO: 1889141
gagccuugcccauaugaag

SEQ ID NO: 2581101 - RNA, 19 nt, Artificial Sequence
  Description of Artificial Sequence: Synthetic oligonucleotide
  Antisense strand to SEQ ID NO: 2581100
cuucauaugggcaaggcuc

SEQ ID NO: 2581102 - RNA, 19 nt, Artificial Sequence
  Description of Artificial Sequence: Synthetic oligonucleotide
  Sense strand starting at position 3084 of SEQ ID NO: 1889141
ugacauaugccuggaccca

SEQ ID NO: 2581103 - RNA, 19 nt, Artificial Sequence
  Description of Artificial Sequence: Synthetic oligonucleotide
  Antisense strand to SEQ ID NO: 2581102
uggguccaggcauauguca

SEQ ID NO: 2581104 - RNA, 19 nt, Artificial Sequence
  Description of Artificial Sequence: Synthetic oligonucleotide
  Sense strand starting at position 3320 of SEQ ID NO: 1889141
ugcauaagguagguugaaa

SEQ ID NO: 2581105 - RNA, 19 nt, Artificial Sequence
  Description of Artificial Sequence: Synthetic oligonucleotide
  Antisense strand to SEQ ID NO: 2581104
uuucaaccuaccuuaugca

SEQ ID NO: 2581106 - RNA, 19 nt, Artificial Sequence
  Description of Artificial Sequence: Synthetic oligonucleotide
  Sense strand starting at position 3685 of SEQ ID NO: 1889141
ccaucaucuguugggaaua

SEQ ID NO: 2581107 - RNA, 19 nt, Artificial Sequence
  Description of Artificial Sequence: Synthetic oligonucleotide
  Antisense strand to SEQ ID NO: 2581106
uauucccaacagaugaugg

SEQ ID NO: 2581108 - RNA, 19 nt, Artificial Sequence
  Description of Artificial Sequence: Synthetic oligonucleotide
  Sense strand starting at position 3717 of SEQ ID NO: 1889141
cuuagagaauggccuugau

SEQ ID NO: 2581109 - RNA, 19 nt, Artificial Sequence
  Description of Artificial Sequence: Synthetic oligonucleotide
  Antisense strand to SEQ ID NO: 2581108
aucaaggccauucucuaag

SEQ ID NO: 2581110 - RNA, 19 nt, Artificial Sequence
  Description of Artificial Sequence: Synthetic oligonucleotide
  Sense strand starting at position 3744 of SEQ ID NO: 1889141
ucagcaaucgaauggauaa

SEQ ID NO: 2581111 - RNA, 19 nt, Artificial Sequence
  Description of Artificial Sequence: Synthetic oligonucleotide
  Antisense strand to SEQ ID NO: 2581110
uuauccauucgauugcuga

SEQ ID NO: 2581112 - RNA, 19 nt, Artificial Sequence
  Description of Artificial Sequence: Synthetic oligonucleotide
  Sense strand starting at position 28 of SEQ ID NO: 1889142
aggaguucagguggcagaa

SEQ ID NO: 2581113 - RNA, 19 nt, Artificial Sequence
  Description of Artificial Sequence: Synthetic oligonucleotide
  Antisense strand to SEQ ID NO: 2581112
uucugccaccugaacuccu

SEQ ID NO: 2581114 - RNA, 19 nt, Artificial Sequence
  Description of Artificial Sequence: Synthetic oligonucleotide
  Sense strand starting at position 161 of SEQ ID NO: 1889142
ggauguggccuccauacuu

SEQ ID NO: 2581115 - RNA, 19 nt, Artificial Sequence
  Description of Artificial Sequence: Synthetic oligonucleotide
  Antisense strand to SEQ ID NO: 2581114
aaguauggaggccacaucc

SEQ ID NO: 2581116 - RNA, 19 nt, Artificial Sequence
  Description of Artificial Sequence: Synthetic oligonucleotide
  Sense strand starting at position 274 of SEQ ID NO: 1889142
gugaaugacccucagugga

SEQ ID NO: 2581117 - RNA, 19 nt, Artificial Sequence
  Description of Artificial Sequence: Synthetic oligonucleotide
  Antisense strand to SEQ ID NO: 2581116
uccacugagggucauucac

SEQ ID NO: 2581118 - RNA, 19 nt, Artificial Sequence
  Description of Artificial Sequence: Synthetic oligonucleotide
  Sense strand starting at position 287 of SEQ ID NO: 1889142
aguggaauccacugcauga

SEQ ID NO: 2581119 - RNA, 19 nt, Artificial Sequence
  Description of Artificial Sequence: Synthetic oligonucleotide
  Antisense strand to SEQ ID NO: 2581118
ucaugcaguggauuccacu

SEQ ID NO: 2581120 - RNA, 19 nt, Artificial Sequence
  Description of Artificial Sequence: Synthetic oligonucleotide
  Sense strand starting at position 454 of SEQ ID NO: 1889142
ggcagcuguguguacauuu

SEQ ID NO: 2581121 - RNA, 19 nt, Artificial Sequence
  Description of Artificial Sequence: Synthetic oligonucleotide
  Antisense strand to SEQ ID NO: 2581120
aaauguacacacagcugcc

SEQ ID NO: 2581122 - RNA, 19 nt, Artificial Sequence
  Description of Artificial Sequence: Synthetic oligonucleotide
  Sense strand starting at position 496 of SEQ ID NO: 1889142
ucauuaaaucugcauggcu

SEQ ID NO: 2581123 - RNA, 19 nt, Artificial Sequence
  Description of Artificial Sequence: Synthetic oligonucleotide
  Antisense strand to SEQ ID NO: 2581122
agccaugcagauuuaauga

SEQ ID NO: 2581124 - RNA, 19 nt, Artificial Sequence
  Description of Artificial Sequence: Synthetic oligonucleotide
  Sense strand starting at position 667 of SEQ ID NO: 1889142
ggcugaaguugcuugaacu

SEQ ID NO: 2581125 - RNA, 19 nt, Artificial Sequence
  Description of Artificial Sequence: Synthetic oligonucleotide
  Antisense strand to SEQ ID NO: 2581124
aguucaagcaacuucagcc

SEQ ID NO: 2581126 - RNA, 19 nt, Artificial Sequence
  Description of Artificial Sequence: Synthetic oligonucleotide
  Sense strand starting at position 668 of SEQ ID NO: 1889142
gcugaaguugcuugaacuu

SEQ ID NO: 2581127 - RNA, 19 nt, Artificial Sequence
  Description of Artificial Sequence: Synthetic oligonucleotide
  Antisense strand to SEQ ID NO: 2581126
aaguucaagcaacuucagc

SEQ ID NO: 2581128 - RNA, 19 nt, Artificial Sequence
  Description of Artificial Sequence: Synthetic oligonucleotide
  Sense strand starting at position 675 of SEQ ID NO: 1889142
uugcuugaacuuuacagua

SEQ ID NO: 2581129 - RNA, 19 nt, Artificial Sequence
  Description of Artificial Sequence: Synthetic oligonucleotide
  Antisense strand to SEQ ID NO: 2581128
uacuguaaaguucaagcaa

SEQ ID NO: 2581130 - RNA, 19 nt, Artificial Sequence
  Description of Artificial Sequence: Synthetic oligonucleotide
  Sense strand starting at position 948 of SEQ ID NO: 1889142
cggucaugguuccugacuu

SEQ ID NO: 2581131 - RNA, 19 nt, Artificial Sequence
  Description of Artificial Sequence: Synthetic oligonucleotide
  Antisense strand to SEQ ID NO: 2581130
aagucaggaaccaugaccg

SEQ ID NO: 2581132 - RNA, 19 nt, Artificial Sequence
  Description of Artificial Sequence: Synthetic oligonucleotide
  Sense strand starting at position 1117 of SEQ ID NO: 1889142
gggaccuaauucuuaugca

SEQ ID NO: 2581133 - RNA, 19 nt, Artificial Sequence
  Description of Artificial Sequence: Synthetic oligonucleotide
  Antisense strand to SEQ ID NO: 2581132
ugcauaagaauuagguccc

SEQ ID NO: 2581134 - RNA, 19 nt, Artificial Sequence
  Description of Artificial Sequence: Synthetic oligonucleotide
  Sense strand starting at position 1312 of SEQ ID NO: 1889142
gcgucucugccuguaucau

SEQ ID NO: 2581135 - RNA, 19 nt, Artificial Sequence
  Description of Artificial Sequence: Synthetic oligonucleotide
  Antisense strand to SEQ ID NO: 2581134
augauacaggcagagacgc

SEQ ID NO: 2581136 - RNA, 19 nt, Artificial Sequence
  Description of Artificial Sequence: Synthetic oligonucleotide
  Sense strand starting at position 1348 of SEQ ID NO: 1889142
ggcugagagcucugacauc

SEQ ID NO: 2581137 - RNA, 19 nt, Artificial Sequence
  Description of Artificial Sequence: Synthetic oligonucleotide
  Antisense strand to SEQ ID NO: 2581136
gaugucagagcucucagcc

SEQ ID NO: 2581138 - RNA, 19 nt, Artificial Sequence
  Description of Artificial Sequence: Synthetic oligonucleotide
  Sense strand starting at position 1692 of SEQ ID NO: 1889142
accuguguucccugggauu

SEQ ID NO: 2581139 - RNA, 19 nt, Artificial Sequence
  Description of Artificial Sequence: Synthetic oligonucleotide
  Antisense strand to SEQ ID NO: 2581138
aaucccagggaacacaggu

SEQ ID NO: 2581140 - RNA, 19 nt, Artificial Sequence
  Description of Artificial Sequence: Synthetic oligonucleotide
  Sense strand starting at position 1726 of SEQ ID NO: 1889142
gggcuuccugcagaaacau

SEQ ID NO: 2581141 - RNA, 19 nt, Artificial Sequence
  Description of Artificial Sequence: Synthetic oligonucleotide
  Antisense strand to SEQ ID NO: 2581140
auguuucugcaggaagccc

SEQ ID NO: 2581142 - RNA, 19 nt, Artificial Sequence
  Description of Artificial Sequence: Synthetic oligonucleotide
  Sense strand starting at position 1782 of SEQ ID NO: 1889142
gaguguugugaguguagga

SEQ ID NO: 2581143 - RNA, 19 nt, Artificial Sequence
  Description of Artificial Sequence: Synthetic oligonucleotide
  Antisense strand to SEQ ID NO: 2581142
uccuacacucacaacacuc

SEQ ID NO: 2581144 - RNA, 19 nt, Artificial Sequence
  Description of Artificial Sequence: Synthetic oligonucleotide
  Sense strand starting at position 1784 of SEQ ID NO: 1889142
guguugugaguguaggauu

SEQ ID NO: 2581145 - RNA, 19 nt, Artificial Sequence
  Description of Artificial Sequence: Synthetic oligonucleotide
  Antisense strand to SEQ ID NO: 2581144
aauccuacacucacaacac

SEQ ID NO: 2581146 - RNA, 19 nt, Artificial Sequence
  Description of Artificial Sequence: Synthetic oligonucleotide
  Sense strand starting at position 1785 of SEQ ID NO: 1889142
uguugugaguguaggauuu

SEQ ID NO: 2581147 - RNA, 19 nt, Artificial Sequence
  Description of Artificial Sequence: Synthetic oligonucleotide
  Antisense strand to SEQ ID NO: 2581146
aaauccuacacucacaaca

SEQ ID NO: 2581148 - RNA, 19 nt, Artificial Sequence
  Description of Artificial Sequence: Synthetic oligonucleotide
  Sense strand starting at position 1996 of SEQ ID NO: 1889142
augaauacgcagugucuaa

SEQ ID NO: 2581149 - RNA, 19 nt, Artificial Sequence
  Description of Artificial Sequence: Synthetic oligonucleotide
  Antisense strand to SEQ ID NO: 2581148
uuagacacugcguauucau

SEQ ID NO: 2581150 - RNA, 19 nt, Artificial Sequence
  Description of Artificial Sequence: Synthetic oligonucleotide
  Sense strand starting at position 2000 of SEQ ID NO: 1889142
auacgcagugucuaaauca

SEQ ID NO: 2581151 - RNA, 19 nt, Artificial Sequence
  Description of Artificial Sequence: Synthetic oligonucleotide
  Antisense strand to SEQ ID NO: 2581150
ugauuuagacacugcguau

SEQ ID NO: 2581152 - RNA, 19 nt, Artificial Sequence
  Description of Artificial Sequence: Synthetic oligonucleotide
  Sense strand starting at position 2112 of SEQ ID NO: 1889142
cucauuguccuacggucaa

SEQ ID NO: 2581153 - RNA, 19 nt, Artificial Sequence
  Description of Artificial Sequence: Synthetic oligonucleotide
  Antisense strand to SEQ ID NO: 2581152
uugaccguaggacaaugag

SEQ ID NO: 2581154 - RNA, 19 nt, Artificial Sequence
  Description of Artificial Sequence: Synthetic oligonucleotide
  Sense strand starting at position 2432 of SEQ ID NO: 1889142
gguguucagguggaaguaa

SEQ ID NO: 2581155 - RNA, 19 nt, Artificial Sequence
  Description of Artificial Sequence: Synthetic oligonucleotide
  Antisense strand to SEQ ID NO: 2581154
uuacuuccaccugaacacc

SEQ ID NO: 2581156 - RNA, 19 nt, Artificial Sequence
  Description of Artificial Sequence: Synthetic oligonucleotide
  Sense strand starting at position 2494 of SEQ ID NO: 1889142
uggcaaagucuggauguau

SEQ ID NO: 2581157 - RNA, 19 nt, Artificial Sequence
  Description of Artificial Sequence: Synthetic oligonucleotide
  Antisense strand to SEQ ID NO: 2581156
auacauccagacuuugcca

SEQ ID NO: 2581158 - RNA, 19 nt, Artificial Sequence
  Description of Artificial Sequence: Synthetic oligonucleotide
  Sense strand starting at position 2616 of SEQ ID NO: 1889142
ggccuaggguuuccuggau

SEQ ID NO: 2581159 - RNA, 19 nt, Artificial Sequence
  Description of Artificial Sequence: Synthetic oligonucleotide
  Antisense strand to SEQ ID NO: 2581158
auccaggaaacccuaggcc

SEQ ID NO: 2581160 - RNA, 19 nt, Artificial Sequence
  Description of Artificial Sequence: Synthetic oligonucleotide
  Sense strand starting at position 2688 of SEQ ID NO: 1889142
acgggaauccauugcauga

SEQ ID NO: 2581161 - RNA, 19 nt, Artificial Sequence
  Description of Artificial Sequence: Synthetic oligonucleotide
  Antisense strand to SEQ ID NO: 2581160
ucaugcaauggauucccgu

SEQ ID NO: 2581162 - RNA, 19 nt, Artificial Sequence
  Description of Artificial Sequence: Synthetic oligonucleotide
  Sense strand starting at position 2715 of SEQ ID NO: 1889142
uucuaaacccugugagguu

SEQ ID NO: 2581163 - RNA, 19 nt, Artificial Sequence
  Description of Artificial Sequence: Synthetic oligonucleotide
  Antisense strand to SEQ ID NO: 2581162
aaccucacaggguuuagaa

SEQ ID NO: 2581164 - RNA, 19 nt, Artificial Sequence
  Description of Artificial Sequence: Synthetic oligonucleotide
  Sense strand starting at position 2737 of SEQ ID NO: 1889142
augacugggccucauugau

SEQ ID NO: 2581165 - RNA, 19 nt, Artificial Sequence
  Description of Artificial Sequence: Synthetic oligonucleotide
  Antisense strand to SEQ ID NO: 2581164
aucaaugaggcccagucau

SEQ ID NO: 2581166 - RNA, 19 nt, Artificial Sequence
  Description of Artificial Sequence: Synthetic oligonucleotide
  Sense strand starting at position 2818 of SEQ ID NO: 1889142
uucggaaggcugcaugauu

SEQ ID NO: 2581167 - RNA, 19 nt, Artificial Sequence
  Description of Artificial Sequence: Synthetic oligonucleotide
  Antisense strand to SEQ ID NO: 2581166
aaucaugcagccuuccgaa

SEQ ID NO: 2581168 - RNA, 19 nt, Artificial Sequence
  Description of Artificial Sequence: Synthetic oligonucleotide
  Sense strand starting at position 2910 of SEQ ID NO: 1889142
aggcucuucucauugcuga

SEQ ID NO: 2581169 - RNA, 19 nt, Artificial Sequence
  Description of Artificial Sequence: Synthetic oligonucleotide
  Antisense strand to SEQ ID NO: 2581168
ucagcaaugagaagagccu

SEQ ID NO: 2581170 - RNA, 19 nt, Artificial Sequence
  Description of Artificial Sequence: Synthetic oligonucleotide
  Sense strand starting at position 2943 of SEQ ID NO: 1889142
guggucuugcugaguggga

SEQ ID NO: 2581171 - RNA, 19 nt, Artificial Sequence
  Description of Artificial Sequence: Synthetic oligonucleotide
  Antisense strand to SEQ ID NO: 2581170
ucccacucagcaagaccac

SEQ ID NO: 2581172 - RNA, 19 nt, Artificial Sequence
  Description of Artificial Sequence: Synthetic oligonucleotide
  Sense strand starting at position 3096 of SEQ ID NO: 1889142
gcuuuagggucuucugaca

SEQ ID NO: 2581173 - RNA, 19 nt, Artificial Sequence
  Description of Artificial Sequence: Synthetic oligonucleotide
  Antisense strand to SEQ ID NO: 2581172
ugucagaagacccuaaagc

SEQ ID NO: 2581174 - RNA, 19 nt, Artificial Sequence
  Description of Artificial Sequence: Synthetic oligonucleotide
  Sense strand starting at position 3285 of SEQ ID NO: 1889142
cucauuugcacccgugaga

SEQ ID NO: 2581175 - RNA, 19 nt, Artificial Sequence
  Description of Artificial Sequence: Synthetic oligonucleotide
  Antisense strand to SEQ ID NO: 2581174
ucucacgggugcaaaugag

SEQ ID NO: 2581176 - RNA, 19 nt, Artificial Sequence
  Description of Artificial Sequence: Synthetic oligonucleotide
  Sense strand starting at position 3303 of SEQ ID NO: 1889142
aggucaguucgagguguga

SEQ ID NO: 2581177 - RNA, 19 nt, Artificial Sequence
  Description of Artificial Sequence: Synthetic oligonucleotide
  Antisense strand to SEQ ID NO: 2581176
ucacaccucgaacugaccu

SEQ ID NO: 2581178 - RNA, 19 nt, Artificial Sequence
  Description of Artificial Sequence: Synthetic oligonucleotide
  Sense strand starting at position 3460 of SEQ ID NO: 1889142
gugugauuccaucacccga

SEQ ID NO: 2581179 - RNA, 19 nt, Artificial Sequence
  Description of Artificial Sequence: Synthetic oligonucleotide
  Antisense strand to SEQ ID NO: 2581178
ucgggugauggaaucacac

SEQ ID NO: 2581180 - RNA, 19 nt, Artificial Sequence
  Description of Artificial Sequence: Synthetic oligonucleotide
  Sense strand starting at position 3519 of SEQ ID NO: 1889142
gggacuugauucuuacaca

SEQ ID NO: 2581181 - RNA, 19 nt, Artificial Sequence
  Description of Artificial Sequence: Synthetic oligonucleotide
  Antisense strand to SEQ ID NO: 2581180
uguguaagaaucaaguccc

SEQ ID NO: 2581182 - RNA, 19 nt, Artificial Sequence
  Description of Artificial Sequence: Synthetic oligonucleotide
  Sense strand starting at position 3547 of SEQ ID NO: 1889142
ucagccauggagugagaaa

SEQ ID NO: 2581183 - RNA, 19 nt, Artificial Sequence
  Description of Artificial Sequence: Synthetic oligonucleotide
  Antisense strand to SEQ ID NO: 2581182
uuucucacuccauggcuga

SEQ ID NO: 2581184 - RNA, 19 nt, Artificial Sequence
  Description of Artificial Sequence: Synthetic oligonucleotide
  Sense strand starting at position 3827 of SEQ ID NO: 1889142
aacugugagcucuggcuga

SEQ ID NO: 2581185 - RNA, 19 nt, Artificial Sequence
  Description of Artificial Sequence: Synthetic oligonucleotide
  Antisense strand to SEQ ID NO: 2581184
ucagccagagcucacaguu

SEQ ID NO: 2581186 - RNA, 19 nt, Artificial Sequence
  Description of Artificial Sequence: Synthetic oligonucleotide
  Sense strand starting at position 3873 of SEQ ID NO: 1889142
gagacaagucccuguggcu

SEQ ID NO: 2581187 - RNA, 19 nt, Artificial Sequence
  Description of Artificial Sequence: Synthetic oligonucleotide
  Antisense strand to SEQ ID NO: 2581186
agccacagggacuugucuc

SEQ ID NO: 2581188 - RNA, 19 nt, Artificial Sequence
  Description of Artificial Sequence: Synthetic oligonucleotide
  Sense strand starting at position 3952 of SEQ ID NO: 1889142
gugggacccucagcauaau

SEQ ID NO: 2581189 - RNA, 19 nt, Artificial Sequence
  Description of Artificial Sequence: Synthetic oligonucleotide
  Antisense strand to SEQ ID NO: 2581188
auuaugcugagggucccac

SEQ ID NO: 2581190 - RNA, 19 nt, Artificial Sequence
  Description of Artificial Sequence: Synthetic oligonucleotide
  Sense strand starting at position 3964 of SEQ ID NO: 1889142
gcauaaucucaugaugcua

SEQ ID NO: 2581191 - RNA, 19 nt, Artificial Sequence
  Description of Artificial Sequence: Synthetic oligonucleotide
  Antisense strand to SEQ ID NO: 2581190
uagcaucaugagauuaugc

SEQ ID NO: 2581192 - RNA, 19 nt, Artificial Sequence
  Description of Artificial Sequence: Synthetic oligonucleotide
  Sense strand starting at position 110 of SEQ ID NO: 1889144
gcacaaucccucugagagg

SEQ ID NO: 2581193 - RNA, 19 nt, Artificial Sequence
  Description of Artificial Sequence: Synthetic oligonucleotide
  Antisense strand to SEQ ID NO: 2581192
ccucucagagggauugugc

SEQ ID NO: 2581194 - RNA, 19 nt, Artificial Sequence
  Description of Artificial Sequence: Synthetic oligonucleotide
  Sense strand starting at position 387 of SEQ ID NO: 1889144
gucucacauuguuccuuaa

SEQ ID NO: 2581195 - RNA, 19 nt, Artificial Sequence
  Description of Artificial Sequence: Synthetic oligonucleotide
  Antisense strand to SEQ ID NO: 2581194
uuaaggaacaaugugagac

SEQ ID NO: 2581196 - RNA, 19 nt, Artificial Sequence
  Description of Artificial Sequence: Synthetic oligonucleotide
  Sense strand starting at position 621 of SEQ ID NO: 1889144
cugcucucauuccagaaga

SEQ ID NO: 2581197 - RNA, 19 nt, Artificial Sequence
  Description of Artificial Sequence: Synthetic oligonucleotide
  Antisense strand to SEQ ID NO: 2581196
ucuucuggaaugagagcag

SEQ ID NO: 2581198 - RNA, 19 nt, Artificial Sequence
  Description of Artificial Sequence: Synthetic oligonucleotide
  Sense strand starting at position 1071 of SEQ ID NO: 1889144
ccgaguuccgcagcaguca

SEQ ID NO: 2581199 - RNA, 19 nt, Artificial Sequence
  Description of Artificial Sequence: Synthetic oligonucleotide
  Antisense strand to SEQ ID NO: 2581198
ugacugcugcggaacucgg

SEQ ID NO: 2581200 - RNA, 19 nt, Artificial Sequence
  Description of Artificial Sequence: Synthetic oligonucleotide
  Sense strand starting at position 1072 of SEQ ID NO: 1889144
cgaguuccgcagcagucaa

SEQ ID NO: 2581201 - RNA, 19 nt, Artificial Sequence
  Description of Artificial Sequence: Synthetic oligonucleotide
  Antisense strand to SEQ ID NO: 2581200
uugacugcugcggaacucg

SEQ ID NO: 2581202 - RNA, 19 nt, Artificial Sequence
  Description of Artificial Sequence: Synthetic oligonucleotide
  Sense strand starting at position 1489 of SEQ ID NO: 1889144
gucucuuacugggauucga

SEQ ID NO: 2581203 - RNA, 19 nt, Artificial Sequence
  Description of Artificial Sequence: Synthetic oligonucleotide
  Antisense strand to SEQ ID NO: 2581202
ucgaaucccaguaagagac

SEQ ID NO: 2581204 - RNA, 19 nt, Artificial Sequence
  Description of Artificial Sequence: Synthetic oligonucleotide
  Sense strand starting at position 1737 of SEQ ID NO: 1889144
acugaagaucucgguccau

SEQ ID NO: 2581205 - RNA, 19 nt, Artificial Sequence
  Description of Artificial Sequence: Synthetic oligonucleotide
  Antisense strand to SEQ ID NO: 2581204
auggaccgagaucuucagu

SEQ ID NO: 2581206 - RNA, 19 nt, Artificial Sequence
  Description of Artificial Sequence: Synthetic oligonucleotide
  Sense strand starting at position 1889 of SEQ ID NO: 1889144
gcaaguuaugcggucggga

SEQ ID NO: 2581207 - RNA, 19 nt, Artificial Sequence
  Description of Artificial Sequence: Synthetic oligonucleotide
  Antisense strand to SEQ ID NO: 2581206
ucccgaccgcauaacuugc

SEQ ID NO: 2581208 - RNA, 19 nt, Artificial Sequence
  Description of Artificial Sequence: Synthetic oligonucleotide
  Sense strand starting at position 1891 of SEQ ID NO: 1889144
aaguuaugcggucgggaag

SEQ ID NO: 2581209 - RNA, 19 nt, Artificial Sequence
  Description of Artificial Sequence: Synthetic oligonucleotide
  Antisense strand to SEQ ID NO: 2581208
cuucccgaccgcauaacuu

SEQ ID NO: 2581210 - RNA, 19 nt, Artificial Sequence
  Description of Artificial Sequence: Synthetic oligonucleotide
  Sense strand starting at position 1892 of SEQ ID NO: 1889144
aguuaugcggucgggaaga

SEQ ID NO: 2581211 - RNA, 19 nt, Artificial Sequence
  Description of Artificial Sequence: Synthetic oligonucleotide
  Antisense strand to SEQ ID NO: 2581210
ucuucccgaccgcauaacu

SEQ ID NO: 2581212 - RNA, 19 nt, Artificial Sequence
  Description of Artificial Sequence: Synthetic oligonucleotide
  Sense strand starting at position 1901 of SEQ ID NO: 1889144
gucgggaagacgugcguua

SEQ ID NO: 2581213 - RNA, 19 nt, Artificial Sequence
  Description of Artificial Sequence: Synthetic oligonucleotide
  Antisense strand to SEQ ID NO: 2581212
uaacgcacgucuucccgac

SEQ ID NO: 2581214 - RNA, 19 nt, Artificial Sequence
  Description of Artificial Sequence: Synthetic oligonucleotide
  Sense strand starting at position 1903 of SEQ ID NO: 1889144
cgggaagacgugcguuaaa

SEQ ID NO: 2581215 - RNA, 19 nt, Artificial Sequence
  Description of Artificial Sequence: Synthetic oligonucleotide
  Antisense strand to SEQ ID NO: 2581214
uuuaacgcacgucuucccg

SEQ ID NO: 2581216 - RNA, 19 nt, Artificial Sequence
  Description of Artificial Sequence: Synthetic oligonucleotide
  Sense strand starting at position 1982 of SEQ ID NO: 1889144
ggacgucgcauugacgauu

SEQ ID NO: 2581217 - RNA, 19 nt, Artificial Sequence
  Description of Artificial Sequence: Synthetic oligonucleotide
  Antisense strand to SEQ ID NO: 2581216
aaucgucaaugcgacgucc

SEQ ID NO: 2581218 - RNA, 19 nt, Artificial Sequence
  Description of Artificial Sequence: Synthetic oligonucleotide
  Sense strand starting at position 2057 of SEQ ID NO: 1889144
ggcgguuuccuucgcaaac

SEQ ID NO: 2581219 - RNA, 19 nt, Artificial Sequence
  Description of Artificial Sequence: Synthetic oligonucleotide
  Antisense strand to SEQ ID NO: 2581218
guuugcgaaggaaaccgcc

SEQ ID NO: 2581220 - RNA, 19 nt, Artificial Sequence
  Description of Artificial Sequence: Synthetic oligonucleotide
  Sense strand starting at position 2095 of SEQ ID NO: 1889144
ggcaauuggucuuuccaag

SEQ ID NO: 2581221 - RNA, 19 nt, Artificial Sequence
  Description of Artificial Sequence: Synthetic oligonucleotide
  Antisense strand to SEQ ID NO: 2581220
cuuggaaagaccaauugcc

SEQ ID NO: 2581222 - RNA, 19 nt, Artificial Sequence
  Description of Artificial Sequence: Synthetic oligonucleotide
  Sense strand starting at position 2102 of SEQ ID NO: 1889144
ggucuuuccaagugucgga

SEQ ID NO: 2581223 - RNA, 19 nt, Artificial Sequence
  Description of Artificial Sequence: Synthetic oligonucleotide
  Antisense strand to SEQ ID NO: 2581222
uccgacacuuggaaagacc

SEQ ID NO: 2581224 - RNA, 19 nt, Artificial Sequence
  Description of Artificial Sequence: Synthetic oligonucleotide
  Sense strand starting at position 2128 of SEQ ID NO: 1889144
gggauauggucuggaaaca

SEQ ID NO: 2581225 - RNA, 19 nt, Artificial Sequence
  Description of Artificial Sequence: Synthetic oligonucleotide
  Antisense strand to SEQ ID NO: 2581224
uguuuccagaccauauccc

SEQ ID NO: 2581226 - RNA, 19 nt, Artificial Sequence
  Description of Artificial Sequence: Synthetic oligonucleotide
  Sense strand starting at position 2154 of SEQ ID NO: 1889144
uugaacaucugguauugaa

SEQ ID NO: 2581227 - RNA, 19 nt, Artificial Sequence
  Description of Artificial Sequence: Synthetic oligonucleotide
  Antisense strand to SEQ ID NO: 2581226
uucaauaccagauguucaa

SEQ ID NO: 2581228 - RNA, 19 nt, Artificial Sequence
  Description of Artificial Sequence: Synthetic oligonucleotide
  Sense strand starting at position 2550 of SEQ ID NO: 1889144
gcaaguuaguucuccaaca

SEQ ID NO: 2581229 - RNA, 19 nt, Artificial Sequence
  Description of Artificial Sequence: Synthetic oligonucleotide
  Antisense strand to SEQ ID NO: 2581228
uguuggagaacuaacuugc

SEQ ID NO: 2581230 - RNA, 19 nt, Artificial Sequence
  Description of Artificial Sequence: Synthetic oligonucleotide
  Sense strand starting at position 2587 of SEQ ID NO: 1889144
aacugaugcggugacagaa

SEQ ID NO: 2581231 - RNA, 19 nt, Artificial Sequence
  Description of Artificial Sequence: Synthetic oligonucleotide
  Antisense strand to SEQ ID NO: 2581230
uucugucaccgcaucaguu

SEQ ID NO: 2581232 - RNA, 19 nt, Artificial Sequence
  Description of Artificial Sequence: Synthetic oligonucleotide
  Sense strand starting at position 2599 of SEQ ID NO: 1889144
gacagaagcauugggugaa

SEQ ID NO: 2581233 - RNA, 19 nt, Artificial Sequence
  Description of Artificial Sequence: Synthetic oligonucleotide
  Antisense strand to SEQ ID NO: 2581232
uucacccaaugcuucuguc

SEQ ID NO: 2581234 - RNA, 19 nt, Artificial Sequence
  Description of Artificial Sequence: Synthetic oligonucleotide
  Sense strand starting at position 2602 of SEQ ID NO: 1889144
agaagcauugggugaaguu

SEQ ID NO: 2581235 - RNA, 19 nt, Artificial Sequence
  Description of Artificial Sequence: Synthetic oligonucleotide
  Antisense strand to SEQ ID NO: 2581234
aacuucacccaaugcuucu

SEQ ID NO: 2581236 - RNA, 19 nt, Artificial Sequence
  Description of Artificial Sequence: Synthetic oligonucleotide
  Sense strand starting at position 2603 of SEQ ID NO: 1889144
gaagcauugggugaaguuc

SEQ ID NO: 2581237 - RNA, 19 nt, Artificial Sequence
  Description of Artificial Sequence: Synthetic oligonucleotide
  Antisense strand to SEQ ID NO: 2581236
gaacuucacccaaugcuuc

SEQ ID NO: 2581238 - RNA, 19 nt, Artificial Sequence
  Description of Artificial Sequence: Synthetic oligonucleotide
  Sense strand starting at position 2611 of SEQ ID NO: 1889144
gggugaaguucacuuggca

SEQ ID NO: 2581239 - RNA, 19 nt, Artificial Sequence
  Description of Artificial Sequence: Synthetic oligonucleotide
  Antisense strand to SEQ ID NO: 2581238
ugccaagugaacuucaccc

SEQ ID NO: 2581240 - RNA, 19 nt, Artificial Sequence
  Description of Artificial Sequence: Synthetic oligonucleotide
  Sense strand starting at position 2696 of SEQ ID NO: 1889144
ugcuguaaucccugcacuu

SEQ ID NO: 2581241 - RNA, 19 nt, Artificial Sequence
  Description of Artificial Sequence: Synthetic oligonucleotide
  Antisense strand to SEQ ID NO: 2581240
aagugcagggauuacagca

SEQ ID NO: 2581242 - RNA, 19 nt, Artificial Sequence
  Description of Artificial Sequence: Synthetic oligonucleotide
  Sense strand starting at position 2735 of SEQ ID NO: 1889144
cuguauugaagccaagagu

SEQ ID NO: 2581243 - RNA, 19 nt, Artificial Sequence
  Description of Artificial Sequence: Synthetic oligonucleotide
  Antisense strand to SEQ ID NO: 2581242
acucuuggcuucaauacag

SEQ ID NO: 2581244 - RNA, 19 nt, Artificial Sequence
  Description of Artificial Sequence: Synthetic oligonucleotide
  Sense strand starting at position 2812 of SEQ ID NO: 1889144
uguagauaugauggugugu

SEQ ID NO: 2581245 - RNA, 19 nt, Artificial Sequence
  Description of Artificial Sequence: Synthetic oligonucleotide
  Antisense strand to SEQ ID NO: 2581244
acacaccaucauaucuaca

SEQ ID NO: 2581246 - RNA, 19 nt, Artificial Sequence
  Description of Artificial Sequence: Synthetic oligonucleotide
  Sense strand starting at position 3027 of SEQ ID NO: 1889144
auauauagaugggugugau

SEQ ID NO: 2581247 - RNA, 19 nt, Artificial Sequence
  Description of Artificial Sequence: Synthetic oligonucleotide
  Antisense strand to SEQ ID NO: 2581246
aucacacccaucuauauau

SEQ ID NO: 2581248 - RNA, 19 nt, Artificial Sequence
  Description of Artificial Sequence: Synthetic oligonucleotide
  Sense strand starting at position 3028 of SEQ ID NO: 1889144
uauauagaugggugugauu

SEQ ID NO: 2581249 - RNA, 19 nt, Artificial Sequence
  Description of Artificial Sequence: Synthetic oligonucleotide
  Antisense strand to SEQ ID NO: 2581248
aaucacacccaucuauaua

SEQ ID NO: 2581250 - RNA, 19 nt, Artificial Sequence
  Description of Artificial Sequence: Synthetic oligonucleotide
  Sense strand starting at position 3030 of SEQ ID NO: 1889144
uauagaugggugugauugu

SEQ ID NO: 2581251 - RNA, 19 nt, Artificial Sequence
  Description of Artificial Sequence: Synthetic oligonucleotide
  Antisense strand to SEQ ID NO: 2581250
acaaucacacccaucuaua

SEQ ID NO: 2581252 - RNA, 19 nt, Artificial Sequence
  Description of Artificial Sequence: Synthetic oligonucleotide
  Sense strand starting at position 3037 of SEQ ID NO: 1889144
gggugugauugugcacacu

SEQ ID NO: 2581253 - RNA, 19 nt, Artificial Sequence
  Description of Artificial Sequence: Synthetic oligonucleotide
  Antisense strand to SEQ ID NO: 2581252
agugugcacaaucacaccc

SEQ ID NO: 2581254 - RNA, 19 nt, Artificial Sequence
  Description of Artificial Sequence: Synthetic oligonucleotide
  Sense strand starting at position 3110 of SEQ ID NO: 1889144
uugagacucuagugagcua

SEQ ID NO: 2581255 - RNA, 19 nt, Artificial Sequence
  Description of Artificial Sequence: Synthetic oligonucleotide
  Antisense strand to SEQ ID NO: 2581254
uagcucacuagagucucaa

SEQ ID NO: 2581256 - RNA, 19 nt, Artificial Sequence
  Description of Artificial Sequence: Synthetic oligonucleotide
  Sense strand starting at position 3665 of SEQ ID NO: 1889144
cuuaauuggugucuuggua

SEQ ID NO: 2581257 - RNA, 19 nt, Artificial Sequence
  Description of Artificial Sequence: Synthetic oligonucleotide
  Antisense strand to SEQ ID NO: 2581256
uaccaagacaccaauuaag

SEQ ID NO: 2581258 - RNA, 19 nt, Artificial Sequence
  Description of Artificial Sequence: Synthetic oligonucleotide
  Sense strand starting at position 3673 of SEQ ID NO: 1889144
gugucuugguaguucauua

SEQ ID NO: 2581259 - RNA, 19 nt, Artificial Sequence
  Description of Artificial Sequence: Synthetic oligonucleotide
  Antisense strand to SEQ ID NO: 2581258
uaaugaacuaccaagacac

SEQ ID NO: 2581260 - RNA, 19 nt, Artificial Sequence
  Description of Artificial Sequence: Synthetic oligonucleotide
  Sense strand starting at position 3739 of SEQ ID NO: 1889144
cagugucucuggccuguaa

SEQ ID NO: 2581261 - RNA, 19 nt, Artificial Sequence
  Description of Artificial Sequence: Synthetic oligonucleotide
  Antisense strand to SEQ ID NO: 2581260
uuacaggccagagacacug

SEQ ID NO: 2581262 - RNA, 19 nt, Artificial Sequence
  Description of Artificial Sequence: Synthetic oligonucleotide
  Sense strand starting at position 3741 of SEQ ID NO: 1889144
gugucucuggccuguaauu

SEQ ID NO: 2581263 - RNA, 19 nt, Artificial Sequence
  Description of Artificial Sequence: Synthetic oligonucleotide
  Antisense strand to SEQ ID NO: 2581262
aauuacaggccagagacac

SEQ ID NO: 2581264 - RNA, 19 nt, Artificial Sequence
  Description of Artificial Sequence: Synthetic oligonucleotide
  Sense strand starting at position 3770 of SEQ ID NO: 1889144
ggagagaaguguuugggau

SEQ ID NO: 2581265 - RNA, 19 nt, Artificial Sequence
  Description of Artificial Sequence: Synthetic oligonucleotide
  Antisense strand to SEQ ID NO: 2581264
aucccaaacacuucucucc

SEQ ID NO: 2581266 - RNA, 19 nt, Artificial Sequence
  Description of Artificial Sequence: Synthetic oligonucleotide
  Sense strand starting at position 3771 of SEQ ID NO: 1889144
gagagaaguguuugggaua

SEQ ID NO: 2581267 - RNA, 19 nt, Artificial Sequence
  Description of Artificial Sequence: Synthetic oligonucleotide
  Antisense strand to SEQ ID NO: 2581266
uaucccaaacacuucucuc

SEQ ID NO: 2581268 - RNA, 19 nt, Artificial Sequence
  Description of Artificial Sequence: Synthetic oligonucleotide
  Sense strand starting at position 3772 of SEQ ID NO: 1889144
agagaaguguuugggauac

SEQ ID NO: 2581269 - RNA, 19 nt, Artificial Sequence
  Description of Artificial Sequence: Synthetic oligonucleotide
  Antisense strand to SEQ ID NO: 2581268
guaucccaaacacuucucu

SEQ ID NO: 2581270 - RNA, 19 nt, Artificial Sequence
  Description of Artificial Sequence: Synthetic oligonucleotide
  Sense strand starting at position 3774 of SEQ ID NO: 1889144
agaaguguuugggauacug

SEQ ID NO: 2581271 - RNA, 19 nt, Artificial Sequence
  Description of Artificial Sequence: Synthetic oligonucleotide
  Antisense strand to SEQ ID NO: 2581270
caguaucccaaacacuucu

SEQ ID NO: 2581272 - RNA, 19 nt, Artificial Sequence
  Description of Artificial Sequence: Synthetic oligonucleotide
  Sense strand starting at position 291 of SEQ ID NO: 1889143
guuggagugagcggacauu

SEQ ID NO: 2581273 - RNA, 19 nt, Artificial Sequence
  Description of Artificial Sequence: Synthetic oligonucleotide
  Antisense strand to SEQ ID NO: 2581272
aauguccgcucacuccaac

SEQ ID NO: 2581274 - RNA, 19 nt, Artificial Sequence
  Description of Artificial Sequence: Synthetic oligonucleotide
  Sense strand starting at position 383 of SEQ ID NO: 1889143
auuauuuaguugccugagu

SEQ ID NO: 2581275 - RNA, 19 nt, Artificial Sequence
  Description of Artificial Sequence: Synthetic oligonucleotide
  Antisense strand to SEQ ID NO: 2581274
acucaggcaacuaaauaau

SEQ ID NO: 2581276 - RNA, 19 nt, Artificial Sequence
  Description of Artificial Sequence: Synthetic oligonucleotide
  Sense strand starting at position 384 of SEQ ID NO: 1889143
uuauuuaguugccugaguu

SEQ ID NO: 2581277 - RNA, 19 nt, Artificial Sequence
  Description of Artificial Sequence: Synthetic oligonucleotide
  Antisense strand to SEQ ID NO: 2581276
aacucaggcaacuaaauaa

SEQ ID NO: 2581278 - RNA, 19 nt, Artificial Sequence
  Description of Artificial Sequence: Synthetic oligonucleotide
  Sense strand starting at position 385 of SEQ ID NO: 1889143
uauuuaguugccugaguuc

SEQ ID NO: 2581279 - RNA, 19 nt, Artificial Sequence
  Description of Artificial Sequence: Synthetic oligonucleotide
  Antisense strand to SEQ ID NO: 2581278
gaacucaggcaacuaaaua

SEQ ID NO: 2581280 - RNA, 19 nt, Artificial Sequence
  Description of Artificial Sequence: Synthetic oligonucleotide
  Sense strand starting at position 388 of SEQ ID NO: 1889143
uuaguugccugaguuccaa

SEQ ID NO: 2581281 - RNA, 19 nt, Artificial Sequence
  Description of Artificial Sequence: Synthetic oligonucleotide
  Antisense strand to SEQ ID NO: 2581280
uuggaacucaggcaacuaa

SEQ ID NO: 2581282 - RNA, 19 nt, Artificial Sequence
  Description of Artificial Sequence: Synthetic oligonucleotide
  Sense strand starting at position 400 of SEQ ID NO: 1889143
guuccaagagcugaagauu

SEQ ID NO: 2581283 - RNA, 19 nt, Artificial Sequence
  Description of Artificial Sequence: Synthetic oligonucleotide
  Antisense strand to SEQ ID NO: 2581282
aaucuucagcucuuggaac

SEQ ID NO: 2581284 - RNA, 19 nt, Artificial Sequence
  Description of Artificial Sequence: Synthetic oligonucleotide
  Sense strand starting at position 458 of SEQ ID NO: 1889143
aguugaauugcacagacau

SEQ ID NO: 2581285 - RNA, 19 nt, Artificial Sequence
  Description of Artificial Sequence: Synthetic oligonucleotide
  Antisense strand to SEQ ID NO: 2581284
augucugugcaauucaacu

SEQ ID NO: 2581286 - RNA, 19 nt, Artificial Sequence
  Description of Artificial Sequence: Synthetic oligonucleotide
  Sense strand starting at position 580 of SEQ ID NO: 1889143
uaccaaacgggucacaauu

SEQ ID NO: 2581287 - RNA, 19 nt, Artificial Sequence
  Description of Artificial Sequence: Synthetic oligonucleotide
  Antisense strand to SEQ ID NO: 2581286
aauugugacccguuuggua

SEQ ID NO: 2581288 - RNA, 19 nt, Artificial Sequence
  Description of Artificial Sequence: Synthetic oligonucleotide
  Sense strand starting at position 588 of SEQ ID NO: 1889143
gggucacaauuccuacaga

SEQ ID NO: 2581289 - RNA, 19 nt, Artificial Sequence
  Description of Artificial Sequence: Synthetic oligonucleotide
  Antisense strand to SEQ ID NO: 2581288
ucuguaggaauugugaccc

SEQ ID NO: 2581290 - RNA, 19 nt, Artificial Sequence
  Description of Artificial Sequence: Synthetic oligonucleotide
  Sense strand starting at position 589 of SEQ ID NO: 1889143
ggucacaauuccuacagaa

SEQ ID NO: 2581291 - RNA, 19 nt, Artificial Sequence
  Description of Artificial Sequence: Synthetic oligonucleotide
  Antisense strand to SEQ ID NO: 2581290
uucuguaggaauugugacc

SEQ ID NO: 2581292 - RNA, 19 nt, Artificial Sequence
  Description of Artificial Sequence: Synthetic oligonucleotide
  Sense strand starting at position 640 of SEQ ID NO: 1889143
acaacaugcuguuagauaa

SEQ ID NO: 2581293 - RNA, 19 nt, Artificial Sequence
  Description of Artificial Sequence: Synthetic oligonucleotide
  Antisense strand to SEQ ID NO: 2581292
uuaucuaacagcauguugu

SEQ ID NO: 2581294 - RNA, 19 nt, Artificial Sequence
  Description of Artificial Sequence: Synthetic oligonucleotide
  Sense strand starting at position 647 of SEQ ID NO: 1889143
gcuguuagauaagcaaugu

SEQ ID NO: 2581295 - RNA, 19 nt, Artificial Sequence
  Description of Artificial Sequence: Synthetic oligonucleotide
  Antisense strand to SEQ ID NO: 2581294
acauugcuuaucuaacagc

SEQ ID NO: 2581296 - RNA, 19 nt, Artificial Sequence
  Description of Artificial Sequence: Synthetic oligonucleotide
  Sense strand starting at position 651 of SEQ ID NO: 1889143
uuagauaagcaauguaucu

SEQ ID NO: 2581297 - RNA, 19 nt, Artificial Sequence
  Description of Artificial Sequence: Synthetic oligonucleotide
  Antisense strand to SEQ ID NO: 2581296
agauacauugcuuaucuaa

SEQ ID NO: 2581298 - RNA, 19 nt, Artificial Sequence
  Description of Artificial Sequence: Synthetic oligonucleotide
  Sense strand starting at position 833 of SEQ ID NO: 1889143
ucuguuauuuaauggauga

SEQ ID NO: 2581299 - RNA, 19 nt, Artificial Sequence
  Description of Artificial Sequence: Synthetic oligonucleotide
  Antisense strand to SEQ ID NO: 2581298
ucauccauuaaauaacaga

SEQ ID NO: 2581300 - RNA, 19 nt, Artificial Sequence
  Description of Artificial Sequence: Synthetic oligonucleotide
  Sense strand starting at position 855 of SEQ ID NO: 1889143
gcucauugcccauaugcaa

SEQ ID NO: 2581301 - RNA, 19 nt, Artificial Sequence
  Description of Artificial Sequence: Synthetic oligonucleotide
  Antisense strand to SEQ ID NO: 2581300
uugcauaugggcaaugagc

SEQ ID NO: 2581302 - RNA, 19 nt, Artificial Sequence
  Description of Artificial Sequence: Synthetic oligonucleotide
  Sense strand starting at position 936 of SEQ ID NO: 1889143
guugcaaaguaauauuaca

SEQ ID NO: 2581303 - RNA, 19 nt, Artificial Sequence
  Description of Artificial Sequence: Synthetic oligonucleotide
  Antisense strand to SEQ ID NO: 2581302
uguaauauuacuuugcaac

SEQ ID NO: 2581304 - RNA, 19 nt, Artificial Sequence
  Description of Artificial Sequence: Synthetic oligonucleotide
  Sense strand starting at position 1164 of SEQ ID NO: 1889143
ucuuacauguuggcugaau

SEQ ID NO: 2581305 - RNA, 19 nt, Artificial Sequence
  Description of Artificial Sequence: Synthetic oligonucleotide
  Antisense strand to SEQ ID NO: 2581304
auucagccaacauguaaga

SEQ ID NO: 2581306 - RNA, 19 nt, Artificial Sequence
  Description of Artificial Sequence: Synthetic oligonucleotide
  Sense strand starting at position 1165 of SEQ ID NO: 1889143
cuuacauguuggcugaaua

SEQ ID NO: 2581307 - RNA, 19 nt, Artificial Sequence
  Description of Artificial Sequence: Synthetic oligonucleotide
  Antisense strand to SEQ ID NO: 2581306
uauucagccaacauguaag

SEQ ID NO: 2581308 - RNA, 19 nt, Artificial Sequence
  Description of Artificial Sequence: Synthetic oligonucleotide
  Sense strand starting at position 1166 of SEQ ID NO: 1889143
uuacauguuggcugaauaa

SEQ ID NO: 2581309 - RNA, 19 nt, Artificial Sequence
  Description of Artificial Sequence: Synthetic oligonucleotide
  Antisense strand to SEQ ID NO: 2581308
uuauucagccaacauguaa

SEQ ID NO: 2581310 - RNA, 19 nt, Artificial Sequence
  Description of Artificial Sequence: Synthetic oligonucleotide
  Sense strand starting at position 1280 of SEQ ID NO: 1889143
cucaaaucaccgcaugaaa

SEQ ID NO: 2581311 - RNA, 19 nt, Artificial Sequence
  Description of Artificial Sequence: Synthetic oligonucleotide
  Antisense strand to SEQ ID NO: 2581310
uuucaugcggugauuugag

SEQ ID NO: 2581312 - RNA, 19 nt, Artificial Sequence
  Description of Artificial Sequence: Synthetic oligonucleotide
  Sense strand starting at position 1421 of SEQ ID NO: 1889143
guuacaucuuaacuguuau

SEQ ID NO: 2581313 - RNA, 19 nt, Artificial Sequence
  Description of Artificial Sequence: Synthetic oligonucleotide
  Antisense strand to SEQ ID NO: 2581312
auaacaguuaagauguaac

SEQ ID NO: 2581314 - RNA, 19 nt, Artificial Sequence
  Description of Artificial Sequence: Synthetic oligonucleotide
  Sense strand starting at position 1462 of SEQ ID NO: 1889143
ggagcugucagagaaucuu

SEQ ID NO: 2581315 - RNA, 19 nt, Artificial Sequence
  Description of Artificial Sequence: Synthetic oligonucleotide
  Antisense strand to SEQ ID NO: 2581314
aagauucucugacagcucc

SEQ ID NO: 2581316 - RNA, 19 nt, Artificial Sequence
  Description of Artificial Sequence: Synthetic oligonucleotide
  Sense strand starting at position 1654 of SEQ ID NO: 1889143
gcacaaucccucugagagg

SEQ ID NO: 2581317 - RNA, 19 nt, Artificial Sequence
  Description of Artificial Sequence: Synthetic oligonucleotide
  Antisense strand to SEQ ID NO: 2581316
ccucucagagggauugugc

SEQ ID NO: 2581318 - RNA, 19 nt, Artificial Sequence
  Description of Artificial Sequence: Synthetic oligonucleotide
  Sense strand starting at position 1931 of SEQ ID NO: 1889143
gucucacauuguuccuuaa

SEQ ID NO: 2581319 - RNA, 19 nt, Artificial Sequence
  Description of Artificial Sequence: Synthetic oligonucleotide
  Antisense strand to SEQ ID NO: 2581318
uuaaggaacaaugugagac

SEQ ID NO: 2581320 - RNA, 19 nt, Artificial Sequence
  Description of Artificial Sequence: Synthetic oligonucleotide
  Sense strand starting at position 2165 of SEQ ID NO: 1889143
cugcucucauuccagaaga

SEQ ID NO: 2581321 - RNA, 19 nt, Artificial Sequence
  Description of Artificial Sequence: Synthetic oligonucleotide
  Antisense strand to SEQ ID NO: 2581320
ucuucuggaaugagagcag

SEQ ID NO: 2581322 - RNA, 19 nt, Artificial Sequence
  Description of Artificial Sequence: Synthetic oligonucleotide
  Sense strand starting at position 2615 of SEQ ID NO: 1889143
ccgaguuccgcagcaguca

SEQ ID NO: 2581323 - RNA, 19 nt, Artificial Sequence
  Description of Artificial Sequence: Synthetic oligonucleotide
  Antisense strand to SEQ ID NO: 2581322
ugacugcugcggaacucgg

SEQ ID NO: 2581324 - RNA, 19 nt, Artificial Sequence
  Description of Artificial Sequence: Synthetic oligonucleotide
  Sense strand starting at position 2616 of SEQ ID NO: 1889143
cgaguuccgcagcagucaa

SEQ ID NO: 2581325 - RNA, 19 nt, Artificial Sequence
  Description of Artificial Sequence: Synthetic oligonucleotide
  Antisense strand to SEQ ID NO: 2581324
uugacugcugcggaacucg

SEQ ID NO: 2581326 - RNA, 19 nt, Artificial Sequence
  Description of Artificial Sequence: Synthetic oligonucleotide
  Sense strand starting at position 3033 of SEQ ID NO: 1889143
gucucuuacugggauucga

SEQ ID NO: 2581327 - RNA, 19 nt, Artificial Sequence
  Description of Artificial Sequence: Synthetic oligonucleotide
  Antisense strand to SEQ ID NO: 2581326
ucgaaucccaguaagagac

SEQ ID NO: 2581328 - RNA, 19 nt, Artificial Sequence
  Description of Artificial Sequence: Synthetic oligonucleotide
  Sense strand starting at position 3281 of SEQ ID NO: 1889143
acugaagaucucgguccau

SEQ ID NO: 2581329 - RNA, 19 nt, Artificial Sequence
  Description of Artificial Sequence: Synthetic oligonucleotide
  Antisense strand to SEQ ID NO: 2581328
auggaccgagaucuucagu

SEQ ID NO: 2581330 - RNA, 19 nt, Artificial Sequence
  Description of Artificial Sequence: Synthetic oligonucleotide
  Sense strand starting at position 3433 of SEQ ID NO: 1889143
gcaaguuaugcggucggga

SEQ ID NO: 2581331 - RNA, 19 nt, Artificial Sequence
  Description of Artificial Sequence: Synthetic oligonucleotide
  Antisense strand to SEQ ID NO: 2581330
ucccgaccgcauaacuugc

SEQ ID NO: 2581332 - RNA, 19 nt, Artificial Sequence
  Description of Artificial Sequence: Synthetic oligonucleotide
  Sense strand starting at position 3435 of SEQ ID NO: 1889143
aaguuaugcggucgggaag

SEQ ID NO: 2581333 - RNA, 19 nt, Artificial Sequence
  Description of Artificial Sequence: Synthetic oligonucleotide
  Antisense strand to SEQ ID NO: 2581332
cuucccgaccgcauaacuu

SEQ ID NO: 2581334 - RNA, 19 nt, Artificial Sequence
  Description of Artificial Sequence: Synthetic oligonucleotide
  Sense strand starting at position 3436 of SEQ ID NO: 1889143
aguuaugcggucgggaaga

SEQ ID NO: 2581335 - RNA, 19 nt, Artificial Sequence
  Description of Artificial Sequence: Synthetic oligonucleotide
  Antisense strand to SEQ ID NO: 2581334
ucuucccgaccgcauaacu

SEQ ID NO: 2581336 - RNA, 19 nt, Artificial Sequence
  Description of Artificial Sequence: Synthetic oligonucleotide
  Sense strand starting at position 3445 of SEQ ID NO: 1889143
gucgggaagacgugcguua

SEQ ID NO: 2581337 - RNA, 19 nt, Artificial Sequence
  Description of Artificial Sequence: Synthetic oligonucleotide
  Antisense strand to SEQ ID NO: 2581336
uaacgcacgucuucccgac

SEQ ID NO: 2581338 - RNA, 19 nt, Artificial Sequence
  Description of Artificial Sequence: Synthetic oligonucleotide
  Sense strand starting at position 3447 of SEQ ID NO: 1889143
cgggaagacgugcguuaaa

SEQ ID NO: 2581339 - RNA, 19 nt, Artificial Sequence
  Description of Artificial Sequence: Synthetic oligonucleotide
  Antisense strand to SEQ ID NO: 2581338
uuuaacgcacgucuucccg

SEQ ID NO: 2581340 - RNA, 19 nt, Artificial Sequence
  Description of Artificial Sequence: Synthetic oligonucleotide
  Sense strand starting at position 3526 of SEQ ID NO: 1889143
ggacgucgcauugacgauu

SEQ ID NO: 2581341 - RNA, 19 nt, Artificial Sequence
  Description of Artificial Sequence: Synthetic oligonucleotide
  Antisense strand to SEQ ID NO: 2581340
aaucgucaaugcgacgucc

SEQ ID NO: 2581342 - RNA, 19 nt, Artificial Sequence
  Description of Artificial Sequence: Synthetic oligonucleotide
  Sense strand starting at position 3601 of SEQ ID NO: 1889143
ggcgguuuccuucgcaaac

SEQ ID NO: 2581343 - RNA, 19 nt, Artificial Sequence
  Description of Artificial Sequence: Synthetic oligonucleotide
  Antisense strand to SEQ ID NO: 2581342
guuugcgaaggaaaccgcc

SEQ ID NO: 2581344 - RNA, 19 nt, Artificial Sequence
  Description of Artificial Sequence: Synthetic oligonucleotide
  Sense strand starting at position 3639 of SEQ ID NO: 1889143
ggcaauuggucuuuccaag

SEQ ID NO: 2581345 - RNA, 19 nt, Artificial Sequence
  Description of Artificial Sequence: Synthetic oligonucleotide
  Antisense strand to SEQ ID NO: 2581344
cuuggaaagaccaauugcc

SEQ ID NO: 2581346 - RNA, 19 nt, Artificial Sequence
  Description of Artificial Sequence: Synthetic oligonucleotide
  Sense strand starting at position 3646 of SEQ ID NO: 1889143
ggucuuuccaagugucgga

SEQ ID NO: 2581347 - RNA, 19 nt, Artificial Sequence
  Description of Artificial Sequence: Synthetic oligonucleotide
  Antisense strand to SEQ ID NO: 2581346
uccgacacuuggaaagacc

SEQ ID NO: 2581348 - RNA, 19 nt, Artificial Sequence
  Description of Artificial Sequence: Synthetic oligonucleotide
  Sense strand starting at position 3672 of SEQ ID NO: 1889143
gggauauggucuggaaaca

SEQ ID NO: 2581349 - RNA, 19 nt, Artificial Sequence
  Description of Artificial Sequence: Synthetic oligonucleotide
  Antisense strand to SEQ ID NO: 2581348
uguuuccagaccauauccc

SEQ ID NO: 2581350 - RNA, 19 nt, Artificial Sequence
  Description of Artificial Sequence: Synthetic oligonucleotide
  Sense strand starting at position 3698 of SEQ ID NO: 1889143
uugaacaucugguauugaa

SEQ ID NO: 2581351 - RNA, 19 nt, Artificial Sequence
  Description of Artificial Sequence: Synthetic oligonucleotide
  Antisense strand to SEQ ID NO: 2581350
uucaauaccagauguucaa

SEQ ID NO: 2581352 - RNA, 19 nt, Artificial Sequence
  Description of Artificial Sequence: Synthetic oligonucleotide
  Sense strand starting at position 25 of SEQ ID NO: 1889145
aaguuucguagugaaagaa

SEQ ID NO: 2581353 - RNA, 19 nt, Artificial Sequence
  Description of Artificial Sequence: Synthetic oligonucleotide
  Antisense strand to SEQ ID NO: 2581352
uucuuucacuacgaaacuu

SEQ ID NO: 2581354 - RNA, 19 nt, Artificial Sequence
  Description of Artificial Sequence: Synthetic oligonucleotide
  Sense strand starting at position 92 of SEQ ID NO: 1889145
gaacgaguugcccaguaag

SEQ ID NO: 2581355 - RNA, 19 nt, Artificial Sequence
  Description of Artificial Sequence: Synthetic oligonucleotide
  Antisense strand to SEQ ID NO: 2581354
cuuacugggcaacucguuc

SEQ ID NO: 2581356 - RNA, 19 nt, Artificial Sequence
  Description of Artificial Sequence: Synthetic oligonucleotide
  Sense strand starting at position 95 of SEQ ID NO: 1889145
cgaguugcccaguaagaga

SEQ ID NO: 2581357 - RNA, 19 nt, Artificial Sequence
  Description of Artificial Sequence: Synthetic oligonucleotide
  Antisense strand to SEQ ID NO: 2581356
ucucuuacugggcaacucg

SEQ ID NO: 2581358 - RNA, 19 nt, Artificial Sequence
  Description of Artificial Sequence: Synthetic oligonucleotide
  Sense strand starting at position 462 of SEQ ID NO: 1889145
auaguuaaggguuacguau

SEQ ID NO: 2581359 - RNA, 19 nt, Artificial Sequence
  Description of Artificial Sequence: Synthetic oligonucleotide
  Antisense strand to SEQ ID NO: 2581358
auacguaacccuuaacuau

SEQ ID NO: 2581360 - RNA, 19 nt, Artificial Sequence
  Description of Artificial Sequence: Synthetic oligonucleotide
  Sense strand starting at position 468 of SEQ ID NO: 1889145
aaggguuacguauacaucu

SEQ ID NO: 2581361 - RNA, 19 nt, Artificial Sequence
  Description of Artificial Sequence: Synthetic oligonucleotide
  Antisense strand to SEQ ID NO: 2581360
agauguauacguaacccuu

SEQ ID NO: 2581362 - RNA, 19 nt, Artificial Sequence
  Description of Artificial Sequence: Synthetic oligonucleotide
  Sense strand starting at position 531 of SEQ ID NO: 1889145
cguacaaauuaaguaaacu

SEQ ID NO: 2581363 - RNA, 19 nt, Artificial Sequence
  Description of Artificial Sequence: Synthetic oligonucleotide
  Antisense strand to SEQ ID NO: 2581362
aguuuacuuaauuuguacg

SEQ ID NO: 2581364 - RNA, 19 nt, Artificial Sequence
  Description of Artificial Sequence: Synthetic oligonucleotide
  Sense strand starting at position 599 of SEQ ID NO: 1889145
cuguguaaauuucuaguuu

SEQ ID NO: 2581365 - RNA, 19 nt, Artificial Sequence
  Description of Artificial Sequence: Synthetic oligonucleotide
  Antisense strand to SEQ ID NO: 2581364
aaacuagaaauuuacacag

SEQ ID NO: 2581366 - RNA, 19 nt, Artificial Sequence
  Description of Artificial Sequence: Synthetic oligonucleotide
  Sense strand starting at position 747 of SEQ ID NO: 1889145
guuguuucuguagagaaca

SEQ ID NO: 2581367 - RNA, 19 nt, Artificial Sequence
  Description of Artificial Sequence: Synthetic oligonucleotide
  Antisense strand to SEQ ID NO: 2581366
uguucucuacagaaacaac

SEQ ID NO: 2581368 - RNA, 19 nt, Artificial Sequence
  Description of Artificial Sequence: Synthetic oligonucleotide
  Sense strand starting at position 863 of SEQ ID NO: 1889145
gagguauaaggcuguaaga

SEQ ID NO: 2581369 - RNA, 19 nt, Artificial Sequence
  Description of Artificial Sequence: Synthetic oligonucleotide
  Antisense strand to SEQ ID NO: 2581368
ucuuacagccuuauaccuc

SEQ ID NO: 2581370 - RNA, 19 nt, Artificial Sequence
  Description of Artificial Sequence: Synthetic oligonucleotide
  Sense strand starting at position 939 of SEQ ID NO: 1889145
ggacaagaagucuggccua

SEQ ID NO: 2581371 - RNA, 19 nt, Artificial Sequence
  Description of Artificial Sequence: Synthetic oligonucleotide
  Antisense strand to SEQ ID NO: 2581370
uaggccagacuucuugucc

SEQ ID NO: 2581372 - RNA, 19 nt, Artificial Sequence
  Description of Artificial Sequence: Synthetic oligonucleotide
  Sense strand starting at position 942 of SEQ ID NO: 1889145
caagaagucuggccuaaug

SEQ ID NO: 2581373 - RNA, 19 nt, Artificial Sequence
  Description of Artificial Sequence: Synthetic oligonucleotide
  Antisense strand to SEQ ID NO: 2581372
cauuaggccagacuucuug

SEQ ID NO: 2581374 - RNA, 19 nt, Artificial Sequence
  Description of Artificial Sequence: Synthetic oligonucleotide
  Sense strand starting at position 944 of SEQ ID NO: 1889145
agaagucuggccuaaugac

SEQ ID NO: 2581375 - RNA, 19 nt, Artificial Sequence
  Description of Artificial Sequence: Synthetic oligonucleotide
  Antisense strand to SEQ ID NO: 2581374
gucauuaggccagacuucu

SEQ ID NO: 2581376 - RNA, 19 nt, Artificial Sequence
  Description of Artificial Sequence: Synthetic oligonucleotide
  Sense strand starting at position 1030 of SEQ ID NO: 1889145
gccaguuucgagccuguga

SEQ ID NO: 2581377 - RNA, 19 nt, Artificial Sequence
  Description of Artificial Sequence: Synthetic oligonucleotide
  Antisense strand to SEQ ID NO: 2581376
ucacaggcucgaaacuggc

SEQ ID NO: 2581378 - RNA, 19 nt, Artificial Sequence
  Description of Artificial Sequence: Synthetic oligonucleotide
  Sense strand starting at position 1163 of SEQ ID NO: 1889145
caccuuaggcauuacgaga

SEQ ID NO: 2581379 - RNA, 19 nt, Artificial Sequence
  Description of Artificial Sequence: Synthetic oligonucleotide
  Antisense strand to SEQ ID NO: 2581378
ucucguaaugccuaaggug

SEQ ID NO: 2581380 - RNA, 19 nt, Artificial Sequence
  Description of Artificial Sequence: Synthetic oligonucleotide
  Sense strand starting at position 2438 of SEQ ID NO: 1889145
guggaaacagcugauuacu

SEQ ID NO: 2581381 - RNA, 19 nt, Artificial Sequence
  Description of Artificial Sequence: Synthetic oligonucleotide
  Antisense strand to SEQ ID NO: 2581380
aguaaucagcuguuuccac

SEQ ID NO: 2581382 - RNA, 19 nt, Artificial Sequence
  Description of Artificial Sequence: Synthetic oligonucleotide
  Sense strand starting at position 2446 of SEQ ID NO: 1889145
agcugauuacuggacaggu

SEQ ID NO: 2581383 - RNA, 19 nt, Artificial Sequence
  Description of Artificial Sequence: Synthetic oligonucleotide
  Antisense strand to SEQ ID NO: 2581382
accuguccaguaaucagcu

SEQ ID NO: 2581384 - RNA, 19 nt, Artificial Sequence
  Description of Artificial Sequence: Synthetic oligonucleotide
  Sense strand starting at position 2482 of SEQ ID NO: 1889145
uuaguaagacugcaaaucu

SEQ ID NO: 2581385 - RNA, 19 nt, Artificial Sequence
  Description of Artificial Sequence: Synthetic oligonucleotide
  Antisense strand to SEQ ID NO: 2581384
agauuugcagucuuacuaa

SEQ ID NO: 2581386 - RNA, 19 nt, Artificial Sequence
  Description of Artificial Sequence: Synthetic oligonucleotide
  Sense strand starting at position 2493 of SEQ ID NO: 1889145
gcaaaucugaugugaacug

SEQ ID NO: 2581387 - RNA, 19 nt, Artificial Sequence
  Description of Artificial Sequence: Synthetic oligonucleotide
  Antisense strand to SEQ ID NO: 2581386
caguucacaucagauuugc

SEQ ID NO: 2581388 - RNA, 19 nt, Artificial Sequence
  Description of Artificial Sequence: Synthetic oligonucleotide
  Sense strand starting at position 2522 of SEQ ID NO: 1889145
gaguguauggcauagucaa

SEQ ID NO: 2581389 - RNA, 19 nt, Artificial Sequence
  Description of Artificial Sequence: Synthetic oligonucleotide
  Antisense strand to SEQ ID NO: 2581388
uugacuaugccauacacuc

SEQ ID NO: 2581390 - RNA, 19 nt, Artificial Sequence
  Description of Artificial Sequence: Synthetic oligonucleotide
  Sense strand starting at position 2889 of SEQ ID NO: 1889145
uguagaauccugggccaga

SEQ ID NO: 2581391 - RNA, 19 nt, Artificial Sequence
  Description of Artificial Sequence: Synthetic oligonucleotide
  Antisense strand to SEQ ID NO: 2581390
ucuggcccaggauucuaca

SEQ ID NO: 2581392 - RNA, 19 nt, Artificial Sequence
  Description of Artificial Sequence: Synthetic oligonucleotide
  Sense strand starting at position 2909 of SEQ ID NO: 1889145
caucuaucuggacgaauag

SEQ ID NO: 2581393 - RNA, 19 nt, Artificial Sequence
  Description of Artificial Sequence: Synthetic oligonucleotide
  Antisense strand to SEQ ID NO: 2581392
cuauucguccagauagaug

SEQ ID NO: 2581394 - RNA, 19 nt, Artificial Sequence
  Description of Artificial Sequence: Synthetic oligonucleotide
  Sense strand starting at position 2996 of SEQ ID NO: 1889145
guuaguaugguauauuaca

SEQ ID NO: 2581395 - RNA, 19 nt, Artificial Sequence
  Description of Artificial Sequence: Synthetic oligonucleotide
  Antisense strand to SEQ ID NO: 2581394
uguaauauaccauacuaac

SEQ ID NO: 2581396 - RNA, 19 nt, Artificial Sequence
  Description of Artificial Sequence: Synthetic oligonucleotide
  Sense strand starting at position 3004 of SEQ ID NO: 1889145
gguauauuacaucgauuaa

SEQ ID NO: 2581397 - RNA, 19 nt, Artificial Sequence
  Description of Artificial Sequence: Synthetic oligonucleotide
  Antisense strand to SEQ ID NO: 2581396
uuaaucgauguaauauacc

SEQ ID NO: 2581398 - RNA, 19 nt, Artificial Sequence
  Description of Artificial Sequence: Synthetic oligonucleotide
  Sense strand starting at position 3043 of SEQ ID NO: 1889145
augaauucccauuaugagc

SEQ ID NO: 2581399 - RNA, 19 nt, Artificial Sequence
  Description of Artificial Sequence: Synthetic oligonucleotide
  Antisense strand to SEQ ID NO: 2581398
gcucauaaugggaauucau

SEQ ID NO: 2581400 - RNA, 19 nt, Artificial Sequence
  Description of Artificial Sequence: Synthetic oligonucleotide
  Sense strand starting at position 3063 of SEQ ID NO: 1889145
ccacuugcucaugauugaa

SEQ ID NO: 2581401 - RNA, 19 nt, Artificial Sequence
  Description of Artificial Sequence: Synthetic oligonucleotide
  Antisense strand to SEQ ID NO: 2581400
uucaaucaugagcaagugg

SEQ ID NO: 2581402 - RNA, 19 nt, Artificial Sequence
  Description of Artificial Sequence: Synthetic oligonucleotide
  Sense strand starting at position 3065 of SEQ ID NO: 1889145
acuugcucaugauugaaga

SEQ ID NO: 2581403 - RNA, 19 nt, Artificial Sequence
  Description of Artificial Sequence: Synthetic oligonucleotide
  Antisense strand to SEQ ID NO: 2581402
ucuucaaucaugagcaagu

SEQ ID NO: 2581404 - RNA, 19 nt, Artificial Sequence
  Description of Artificial Sequence: Synthetic oligonucleotide
  Sense strand starting at position 3066 of SEQ ID NO: 1889145
cuugcucaugauugaagau

SEQ ID NO: 2581405 - RNA, 19 nt, Artificial Sequence
  Description of Artificial Sequence: Synthetic oligonucleotide
  Antisense strand to SEQ ID NO: 2581404
aucuucaaucaugagcaag

SEQ ID NO: 2581406 - RNA, 19 nt, Artificial Sequence
  Description of Artificial Sequence: Synthetic oligonucleotide
  Sense strand starting at position 3102 of SEQ ID NO: 1889145
gauugacucuugguauuau

SEQ ID NO: 2581407 - RNA, 19 nt, Artificial Sequence
  Description of Artificial Sequence: Synthetic oligonucleotide
  Antisense strand to SEQ ID NO: 2581406
auaauaccaagagucaauc

SEQ ID NO: 2581408 - RNA, 19 nt, Artificial Sequence
  Description of Artificial Sequence: Synthetic oligonucleotide
  Sense strand starting at position 3111 of SEQ ID NO: 1889145
uugguauuauuuguccauu

SEQ ID NO: 2581409 - RNA, 19 nt, Artificial Sequence
  Description of Artificial Sequence: Synthetic oligonucleotide
  Antisense strand to SEQ ID NO: 2581408
aauggacaaauaauaccaa

SEQ ID NO: 2581410 - RNA, 19 nt, Artificial Sequence
  Description of Artificial Sequence: Synthetic oligonucleotide
  Sense strand starting at position 3163 of SEQ ID NO: 1889145
cagauuuguuaggauuaga

SEQ ID NO: 2581411 - RNA, 19 nt, Artificial Sequence
  Description of Artificial Sequence: Synthetic oligonucleotide
  Antisense strand to SEQ ID NO: 2581410
ucuaauccuaacaaaucug

SEQ ID NO: 2581412 - RNA, 19 nt, Artificial Sequence
  Description of Artificial Sequence: Synthetic oligonucleotide
  Sense strand starting at position 3283 of SEQ ID NO: 1889145
aucaucagccagcaaagau

SEQ ID NO: 2581413 - RNA, 19 nt, Artificial Sequence
  Description of Artificial Sequence: Synthetic oligonucleotide
  Antisense strand to SEQ ID NO: 2581412
aucuuugcuggcugaugau

SEQ ID NO: 2581414 - RNA, 19 nt, Artificial Sequence
  Description of Artificial Sequence: Synthetic oligonucleotide
  Sense strand starting at position 3327 of SEQ ID NO: 1889145
cggugucucgguccuguaa

SEQ ID NO: 2581415 - RNA, 19 nt, Artificial Sequence
  Description of Artificial Sequence: Synthetic oligonucleotide
  Antisense strand to SEQ ID NO: 2581414
uuacaggaccgagacaccg

SEQ ID NO: 2581416 - RNA, 19 nt, Artificial Sequence
  Description of Artificial Sequence: Synthetic oligonucleotide
  Sense strand starting at position 3328 of SEQ ID NO: 1889145
ggugucucgguccuguaau

SEQ ID NO: 2581417 - RNA, 19 nt, Artificial Sequence
  Description of Artificial Sequence: Synthetic oligonucleotide
  Antisense strand to SEQ ID NO: 2581416
auuacaggaccgagacacc

SEQ ID NO: 2581418 - RNA, 19 nt, Artificial Sequence
  Description of Artificial Sequence: Synthetic oligonucleotide
  Sense strand starting at position 3418 of SEQ ID NO: 1889145
ggcgaaacuccgucuguuc

SEQ ID NO: 2581419 - RNA, 19 nt, Artificial Sequence
  Description of Artificial Sequence: Synthetic oligonucleotide
  Antisense strand to SEQ ID NO: 2581418
gaacagacggaguuucgcc

SEQ ID NO: 2581420 - RNA, 19 nt, Artificial Sequence
  Description of Artificial Sequence: Synthetic oligonucleotide
  Sense strand starting at position 3760 of SEQ ID NO: 1889145
gaagucuugauagguauag

SEQ ID NO: 2581421 - RNA, 19 nt, Artificial Sequence
  Description of Artificial Sequence: Synthetic oligonucleotide
  Antisense strand to SEQ ID NO: 2581420
cuauaccuaucaagacuuc

SEQ ID NO: 2581422 - RNA, 19 nt, Artificial Sequence
  Description of Artificial Sequence: Synthetic oligonucleotide
  Sense strand starting at position 3761 of SEQ ID NO: 1889145
aagucuugauagguauaga

SEQ ID NO: 2581423 - RNA, 19 nt, Artificial Sequence
  Description of Artificial Sequence: Synthetic oligonucleotide
  Antisense strand to SEQ ID NO: 2581422
ucuauaccuaucaagacuu

SEQ ID NO: 2581424 - RNA, 19 nt, Artificial Sequence
  Description of Artificial Sequence: Synthetic oligonucleotide
  Sense strand starting at position 3873 of SEQ ID NO: 1889145
auacuaauacacuguguaa

SEQ ID NO: 2581425 - RNA, 19 nt, Artificial Sequence
  Description of Artificial Sequence: Synthetic oligonucleotide
  Antisense strand to SEQ ID NO: 2581424
uuacacaguguauuaguau

SEQ ID NO: 2581426 - RNA, 19 nt, Artificial Sequence
  Description of Artificial Sequence: Synthetic oligonucleotide
  Sense strand starting at position 3875 of SEQ ID NO: 1889145
acuaauacacuguguaaua

SEQ ID NO: 2581427 - RNA, 19 nt, Artificial Sequence
  Description of Artificial Sequence: Synthetic oligonucleotide
  Antisense strand to SEQ ID NO: 2581426
uauuacacaguguauuagu

SEQ ID NO: 2581428 - RNA, 19 nt, Artificial Sequence
  Description of Artificial Sequence: Synthetic oligonucleotide
  Sense strand starting at position 3937 of SEQ ID NO: 1889145
aauauagaacucuguugga

SEQ ID NO: 2581429 - RNA, 19 nt, Artificial Sequence
  Description of Artificial Sequence: Synthetic oligonucleotide
  Antisense strand to SEQ ID NO: 2581428
uccaacagaguucuauauu

SEQ ID NO: 2581430 - RNA, 19 nt, Artificial Sequence
  Description of Artificial Sequence: Synthetic oligonucleotide
  Sense strand starting at position 3946 of SEQ ID NO: 1889145
cucuguuggaucugggauu

SEQ ID NO: 2581431 - RNA, 19 nt, Artificial Sequence
  Description of Artificial Sequence: Synthetic oligonucleotide
  Antisense strand to SEQ ID NO: 2581430
aaucccagauccaacagag

SEQ ID NO: 2581432 - RNA, 19 nt, Artificial Sequence
  Description of Artificial Sequence: Synthetic oligonucleotide
  Sense strand starting at position 136 of SEQ ID NO: 1889146
gacauagggcuuugugcaa

SEQ ID NO: 2581433 - RNA, 19 nt, Artificial Sequence
  Description of Artificial Sequence: Synthetic oligonucleotide
  Antisense strand to SEQ ID NO: 2581432
uugcacaaagcccuauguc

SEQ ID NO: 2581434 - RNA, 19 nt, Artificial Sequence
  Description of Artificial Sequence: Synthetic oligonucleotide
  Sense strand starting at position 231 of SEQ ID NO: 1889146
ccaggucacucugcaagaa

SEQ ID NO: 2581435 - RNA, 19 nt, Artificial Sequence
  Description of Artificial Sequence: Synthetic oligonucleotide
  Antisense strand to SEQ ID NO: 2581434
uucuugcagagugaccugg

SEQ ID NO: 2581436 - RNA, 19 nt, Artificial Sequence
  Description of Artificial Sequence: Synthetic oligonucleotide
  Sense strand starting at position 232 of SEQ ID NO: 1889146
caggucacucugcaagaaa

SEQ ID NO: 2581437 - RNA, 19 nt, Artificial Sequence
  Description of Artificial Sequence: Synthetic oligonucleotide
  Antisense strand to SEQ ID NO: 2581436
uuucuugcagagugaccug

SEQ ID NO: 2581438 - RNA, 19 nt, Artificial Sequence
  Description of Artificial Sequence: Synthetic oligonucleotide
  Sense strand starting at position 235 of SEQ ID NO: 1889146
gucacucugcaagaaacaa

SEQ ID NO: 2581439 - RNA, 19 nt, Artificial Sequence
  Description of Artificial Sequence: Synthetic oligonucleotide
  Antisense strand to SEQ ID NO: 2581438
uuguuucuugcagagugac

SEQ ID NO: 2581440 - RNA, 19 nt, Artificial Sequence
  Description of Artificial Sequence: Synthetic oligonucleotide
  Sense strand starting at position 434 of SEQ ID NO: 1889146
acaagagcugacuaguagu

SEQ ID NO: 2581441 - RNA, 19 nt, Artificial Sequence
  Description of Artificial Sequence: Synthetic oligonucleotide
  Antisense strand to SEQ ID NO: 2581440
acuacuagucagcucuugu

SEQ ID NO: 2581442 - RNA, 19 nt, Artificial Sequence
  Description of Artificial Sequence: Synthetic oligonucleotide
  Sense strand starting at position 538 of SEQ ID NO: 1889146
cgguaucucacgccuugua

SEQ ID NO: 2581443 - RNA, 19 nt, Artificial Sequence
  Description of Artificial Sequence: Synthetic oligonucleotide
  Antisense strand to SEQ ID NO: 2581442
uacaaggcgugagauaccg

SEQ ID NO: 2581444 - RNA, 19 nt, Artificial Sequence
  Description of Artificial Sequence: Synthetic oligonucleotide
  Sense strand starting at position 854 of SEQ ID NO: 1889146
aaagaaguguuuguguuug

SEQ ID NO: 2581445 - RNA, 19 nt, Artificial Sequence
  Description of Artificial Sequence: Synthetic oligonucleotide
  Antisense strand to SEQ ID NO: 2581444
caaacacaaacacuucuuu

SEQ ID NO: 2581446 - RNA, 19 nt, Artificial Sequence
  Description of Artificial Sequence: Synthetic oligonucleotide
  Sense strand starting at position 987 of SEQ ID NO: 1889146
cccagugucuucuucuuua

SEQ ID NO: 2581447 - RNA, 19 nt, Artificial Sequence
  Description of Artificial Sequence: Synthetic oligonucleotide
  Antisense strand to SEQ ID NO: 2581446
uaaagaagaagacacuggg

SEQ ID NO: 2581448 - RNA, 19 nt, Artificial Sequence
  Description of Artificial Sequence: Synthetic oligonucleotide
  Sense strand starting at position 1331 of SEQ ID NO: 1889146
ggaggugaaucagaugaag

SEQ ID NO: 2581449 - RNA, 19 nt, Artificial Sequence
  Description of Artificial Sequence: Synthetic oligonucleotide
  Antisense strand to SEQ ID NO: 2581448
cuucaucugauucaccucc

SEQ ID NO: 2581450 - RNA, 19 nt, Artificial Sequence
  Description of Artificial Sequence: Synthetic oligonucleotide
  Sense strand starting at position 1430 of SEQ ID NO: 1889146
agacuuuauuucuguggaa

SEQ ID NO: 2581451 - RNA, 19 nt, Artificial Sequence
  Description of Artificial Sequence: Synthetic oligonucleotide
  Antisense strand to SEQ ID NO: 2581450
uuccacagaaauaaagucu

SEQ ID NO: 2581452 - RNA, 19 nt, Artificial Sequence
  Description of Artificial Sequence: Synthetic oligonucleotide
  Sense strand starting at position 1515 of SEQ ID NO: 1889146
guggaagaaucccuuaucu

SEQ ID NO: 2581453 - RNA, 19 nt, Artificial Sequence
  Description of Artificial Sequence: Synthetic oligonucleotide
  Antisense strand to SEQ ID NO: 2581452
agauaagggauucuuccac

SEQ ID NO: 2581454 - RNA, 19 nt, Artificial Sequence
  Description of Artificial Sequence: Synthetic oligonucleotide
  Sense strand starting at position 1523 of SEQ ID NO: 1889146
aucccuuaucuugguaguu

SEQ ID NO: 2581455 - RNA, 19 nt, Artificial Sequence
  Description of Artificial Sequence: Synthetic oligonucleotide
  Antisense strand to SEQ ID NO: 2581454
aacuaccaagauaagggau

SEQ ID NO: 2581456 - RNA, 19 nt, Artificial Sequence
  Description of Artificial Sequence: Synthetic oligonucleotide
  Sense strand starting at position 1524 of SEQ ID NO: 1889146
ucccuuaucuugguaguuu

SEQ ID NO: 2581457 - RNA, 19 nt, Artificial Sequence
  Description of Artificial Sequence: Synthetic oligonucleotide
  Antisense strand to SEQ ID NO: 2581456
aaacuaccaagauaaggga

SEQ ID NO: 2581458 - RNA, 19 nt, Artificial Sequence
  Description of Artificial Sequence: Synthetic oligonucleotide
  Sense strand starting at position 1693 of SEQ ID NO: 1889146
caauguugugauugcucua

SEQ ID NO: 2581459 - RNA, 19 nt, Artificial Sequence
  Description of Artificial Sequence: Synthetic oligonucleotide
  Antisense strand to SEQ ID NO: 2581458
uagagcaaucacaacauug

SEQ ID NO: 2581460 - RNA, 19 nt, Artificial Sequence
  Description of Artificial Sequence: Synthetic oligonucleotide
  Sense strand starting at position 1696 of SEQ ID NO: 1889146
uguugugauugcucuauaa

SEQ ID NO: 2581461 - RNA, 19 nt, Artificial Sequence
  Description of Artificial Sequence: Synthetic oligonucleotide
  Antisense strand to SEQ ID NO: 2581460
uuauagagcaaucacaaca

SEQ ID NO: 2581462 - RNA, 19 nt, Artificial Sequence
  Description of Artificial Sequence: Synthetic oligonucleotide
  Sense strand starting at position 1698 of SEQ ID NO: 1889146
uugugauugcucuauaaug

SEQ ID NO: 2581463 - RNA, 19 nt, Artificial Sequence
  Description of Artificial Sequence: Synthetic oligonucleotide
  Antisense strand to SEQ ID NO: 2581462
cauuauagagcaaucacaa

SEQ ID NO: 2581464 - RNA, 19 nt, Artificial Sequence
  Description of Artificial Sequence: Synthetic oligonucleotide
  Sense strand starting at position 1700 of SEQ ID NO: 1889146
gugauugcucuauaaugau

SEQ ID NO: 2581465 - RNA, 19 nt, Artificial Sequence
  Description of Artificial Sequence: Synthetic oligonucleotide
  Antisense strand to SEQ ID NO: 2581464
aucauuauagagcaaucac

SEQ ID NO: 2581466 - RNA, 19 nt, Artificial Sequence
  Description of Artificial Sequence: Synthetic oligonucleotide
  Sense strand starting at position 1760 of SEQ ID NO: 1889146
ggcacaucuaacuguggua

SEQ ID NO: 2581467 - RNA, 19 nt, Artificial Sequence
  Description of Artificial Sequence: Synthetic oligonucleotide
  Antisense strand to SEQ ID NO: 2581466
uaccacaguuagaugugcc

SEQ ID NO: 2581468 - RNA, 19 nt, Artificial Sequence
  Description of Artificial Sequence: Synthetic oligonucleotide
  Sense strand starting at position 1773 of SEQ ID NO: 1889146
gugguaaugauccacuguu

SEQ ID NO: 2581469 - RNA, 19 nt, Artificial Sequence
  Description of Artificial Sequence: Synthetic oligonucleotide
  Antisense strand to SEQ ID NO: 2581468
aacaguggaucauuaccac

SEQ ID NO: 2581470 - RNA, 19 nt, Artificial Sequence
  Description of Artificial Sequence: Synthetic oligonucleotide
  Sense strand starting at position 1853 of SEQ ID NO: 1889146
gugguaaggauccacuguu

SEQ ID NO: 2581471 - RNA, 19 nt, Artificial Sequence
  Description of Artificial Sequence: Synthetic oligonucleotide
  Antisense strand to SEQ ID NO: 2581470
aacaguggauccuuaccac

SEQ ID NO: 2581472 - RNA, 19 nt, Artificial Sequence
  Description of Artificial Sequence: Synthetic oligonucleotide
  Sense strand starting at position 2158 of SEQ ID NO: 1889146
auacuacaguuguuaucua

SEQ ID NO: 2581473 - RNA, 19 nt, Artificial Sequence
  Description of Artificial Sequence: Synthetic oligonucleotide
  Antisense strand to SEQ ID NO: 2581472
uagauaacaacuguaguau

SEQ ID NO: 2581474 - RNA, 19 nt, Artificial Sequence
  Description of Artificial Sequence: Synthetic oligonucleotide
  Sense strand starting at position 2165 of SEQ ID NO: 1889146
aguuguuaucuacauacuu

SEQ ID NO: 2581475 - RNA, 19 nt, Artificial Sequence
  Description of Artificial Sequence: Synthetic oligonucleotide
  Antisense strand to SEQ ID NO: 2581474
aaguauguagauaacaacu

SEQ ID NO: 2581476 - RNA, 19 nt, Artificial Sequence
  Description of Artificial Sequence: Synthetic oligonucleotide
  Sense strand starting at position 2293 of SEQ ID NO: 1889146
auauacgucaaguggaaua

SEQ ID NO: 2581477 - RNA, 19 nt, Artificial Sequence
  Description of Artificial Sequence: Synthetic oligonucleotide
  Antisense strand to SEQ ID NO: 2581476
uauuccacuugacguauau

SEQ ID NO: 2581478 - RNA, 19 nt, Artificial Sequence
  Description of Artificial Sequence: Synthetic oligonucleotide
  Sense strand starting at position 2295 of SEQ ID NO: 1889146
auacgucaaguggaauaau

SEQ ID NO: 2581479 - RNA, 19 nt, Artificial Sequence
  Description of Artificial Sequence: Synthetic oligonucleotide
  Antisense strand to SEQ ID NO: 2581478
auuauuccacuugacguau

SEQ ID NO: 2581480 - RNA, 19 nt, Artificial Sequence
  Description of Artificial Sequence: Synthetic oligonucleotide
  Sense strand starting at position 2630 of SEQ ID NO: 1889146
uggaaacuuucuuuccaga

SEQ ID NO: 2581481 - RNA, 19 nt, Artificial Sequence
  Description of Artificial Sequence: Synthetic oligonucleotide
  Antisense strand to SEQ ID NO: 2581480
ucuggaaagaaaguuucca

SEQ ID NO: 2581482 - RNA, 19 nt, Artificial Sequence
  Description of Artificial Sequence: Synthetic oligonucleotide
  Sense strand starting at position 2651 of SEQ ID NO: 1889146
acagauaguugacacucaa

SEQ ID NO: 2581483 - RNA, 19 nt, Artificial Sequence
  Description of Artificial Sequence: Synthetic oligonucleotide
  Antisense strand to SEQ ID NO: 2581482
uugagugucaacuaucugu

SEQ ID NO: 2581484 - RNA, 19 nt, Artificial Sequence
  Description of Artificial Sequence: Synthetic oligonucleotide
  Sense strand starting at position 2681 of SEQ ID NO: 1889146
uugaguucugcaugccuaa

SEQ ID NO: 2581485 - RNA, 19 nt, Artificial Sequence
  Description of Artificial Sequence: Synthetic oligonucleotide
  Antisense strand to SEQ ID NO: 2581484
uuaggcaugcagaacucaa

SEQ ID NO: 2581486 - RNA, 19 nt, Artificial Sequence
  Description of Artificial Sequence: Synthetic oligonucleotide
  Sense strand starting at position 2866 of SEQ ID NO: 1889146
ggcuauggauaggacaaua

SEQ ID NO: 2581487 - RNA, 19 nt, Artificial Sequence
  Description of Artificial Sequence: Synthetic oligonucleotide
  Antisense strand to SEQ ID NO: 2581486
uauuguccuauccauagcc

SEQ ID NO: 2581488 - RNA, 19 nt, Artificial Sequence
  Description of Artificial Sequence: Synthetic oligonucleotide
  Sense strand starting at position 2984 of SEQ ID NO: 1889146
aguguucacggagauugaa

SEQ ID NO: 2581489 - RNA, 19 nt, Artificial Sequence
  Description of Artificial Sequence: Synthetic oligonucleotide
  Antisense strand to SEQ ID NO: 2581488
uucaaucuccgugaacacu

SEQ ID NO: 2581490 - RNA, 19 nt, Artificial Sequence
  Description of Artificial Sequence: Synthetic oligonucleotide
  Sense strand starting at position 3095 of SEQ ID NO: 1889146
ugccauagugcugguaaac

SEQ ID NO: 2581491 - RNA, 19 nt, Artificial Sequence
  Description of Artificial Sequence: Synthetic oligonucleotide
  Antisense strand to SEQ ID NO: 2581490
guuuaccagcacuauggca

SEQ ID NO: 2581492 - RNA, 19 nt, Artificial Sequence
  Description of Artificial Sequence: Synthetic oligonucleotide
  Sense strand starting at position 3215 of SEQ ID NO: 1889146
auauacuaaucugggaaag

SEQ ID NO: 2581493 - RNA, 19 nt, Artificial Sequence
  Description of Artificial Sequence: Synthetic oligonucleotide
  Antisense strand to SEQ ID NO: 2581492
cuuucccagauuaguauau

SEQ ID NO: 2581494 - RNA, 19 nt, Artificial Sequence
  Description of Artificial Sequence: Synthetic oligonucleotide
  Sense strand starting at position 3256 of SEQ ID NO: 1889146
aggguacauguuuggacaa

SEQ ID NO: 2581495 - RNA, 19 nt, Artificial Sequence
  Description of Artificial Sequence: Synthetic oligonucleotide
  Antisense strand to SEQ ID NO: 2581494
uuguccaaacauguacccu

SEQ ID NO: 2581496 - RNA, 19 nt, Artificial Sequence
  Description of Artificial Sequence: Synthetic oligonucleotide
  Sense strand starting at position 3362 of SEQ ID NO: 1889146
gguucugggacuuaguauu

SEQ ID NO: 2581497 - RNA, 19 nt, Artificial Sequence
  Description of Artificial Sequence: Synthetic oligonucleotide
  Antisense strand to SEQ ID NO: 2581496
aauacuaagucccagaacc

SEQ ID NO: 2581498 - RNA, 19 nt, Artificial Sequence
  Description of Artificial Sequence: Synthetic oligonucleotide
  Sense strand starting at position 3502 of SEQ ID NO: 1889146
auaugaguguucuuccugu

SEQ ID NO: 2581499 - RNA, 19 nt, Artificial Sequence
  Description of Artificial Sequence: Synthetic oligonucleotide
  Antisense strand to SEQ ID NO: 2581498
acaggaagaacacucauau

SEQ ID NO: 2581500 - RNA, 19 nt, Artificial Sequence
  Description of Artificial Sequence: Synthetic oligonucleotide
  Sense strand starting at position 3508 of SEQ ID NO: 1889146
guguucuuccuguaagcaa

SEQ ID NO: 2581501 - RNA, 19 nt, Artificial Sequence
  Description of Artificial Sequence: Synthetic oligonucleotide
  Antisense strand to SEQ ID NO: 2581500
uugcuuacaggaagaacac

SEQ ID NO: 2581502 - RNA, 19 nt, Artificial Sequence
  Description of Artificial Sequence: Synthetic oligonucleotide
  Sense strand starting at position 3651 of SEQ ID NO: 1889146
uuugaauaagcucaugauc

SEQ ID NO: 2581503 - RNA, 19 nt, Artificial Sequence
  Description of Artificial Sequence: Synthetic oligonucleotide
  Antisense strand to SEQ ID NO: 2581502
gaucaugagcuuauucaaa

SEQ ID NO: 2581504 - RNA, 19 nt, Artificial Sequence
  Description of Artificial Sequence: Synthetic oligonucleotide
  Sense strand starting at position 3659 of SEQ ID NO: 1889146
agcucaugaucugccuuua

SEQ ID NO: 2581505 - RNA, 19 nt, Artificial Sequence
  Description of Artificial Sequence: Synthetic oligonucleotide
  Antisense strand to SEQ ID NO: 2581504
uaaaggcagaucaugagcu

SEQ ID NO: 2581506 - RNA, 19 nt, Artificial Sequence
  Description of Artificial Sequence: Synthetic oligonucleotide
  Sense strand starting at position 3760 of SEQ ID NO: 1889146
ccagguuugaaauguagca

SEQ ID NO: 2581507 - RNA, 19 nt, Artificial Sequence
  Description of Artificial Sequence: Synthetic oligonucleotide
  Antisense strand to SEQ ID NO: 2581506
ugcuacauuucaaaccugg

SEQ ID NO: 2581508 - RNA, 19 nt, Artificial Sequence
  Description of Artificial Sequence: Synthetic oligonucleotide
  Sense strand starting at position 3876 of SEQ ID NO: 1889146
cacauugagucuguaagca

SEQ ID NO: 2581509 - RNA, 19 nt, Artificial Sequence
  Description of Artificial Sequence: Synthetic oligonucleotide
  Antisense strand to SEQ ID NO: 2581508
ugcuuacagacucaaugug

SEQ ID NO: 2581510 - RNA, 19 nt, Artificial Sequence
  Description of Artificial Sequence: Synthetic oligonucleotide
  Sense strand starting at position 3947 of SEQ ID NO: 1889146
acaguccaaguuuggaaua

SEQ ID NO: 2581511 - RNA, 19 nt, Artificial Sequence
  Description of Artificial Sequence: Synthetic oligonucleotide
  Antisense strand to SEQ ID NO: 2581510
uauuccaaacuuggacugu

SEQ ID NO: 2581512 - RNA, 19 nt, Artificial Sequence
  Description of Artificial Sequence: Synthetic oligonucleotide
  Sense strand starting at position 112 of SEQ ID NO: 1889149
agguaugaguggucccuga

SEQ ID NO: 2581513 - RNA, 19 nt, Artificial Sequence
  Description of Artificial Sequence: Synthetic oligonucleotide
  Antisense strand to SEQ ID NO: 2581512
ucagggaccacucauaccu

SEQ ID NO: 2581514 - RNA, 19 nt, Artificial Sequence
  Description of Artificial Sequence: Synthetic oligonucleotide
  Sense strand starting at position 254 of SEQ ID NO: 1889149
gccagucacugagugacuu

SEQ ID NO: 2581515 - RNA, 19 nt, Artificial Sequence
  Description of Artificial Sequence: Synthetic oligonucleotide
  Antisense strand to SEQ ID NO: 2581514
aagucacucagugacuggc

SEQ ID NO: 2581516 - RNA, 19 nt, Artificial Sequence
  Description of Artificial Sequence: Synthetic oligonucleotide
  Sense strand starting at position 265 of SEQ ID NO: 1889149
agugacuuccauugcccau

SEQ ID NO: 2581517 - RNA, 19 nt, Artificial Sequence
  Description of Artificial Sequence: Synthetic oligonucleotide
  Antisense strand to SEQ ID NO: 2581516
augggcaauggaagucacu

SEQ ID NO: 2581518 - RNA, 19 nt, Artificial Sequence
  Description of Artificial Sequence: Synthetic oligonucleotide
  Sense strand starting at position 276 of SEQ ID NO: 1889149
uugcccaugucucuaauga

SEQ ID NO: 2581519 - RNA, 19 nt, Artificial Sequence
  Description of Artificial Sequence: Synthetic oligonucleotide
  Antisense strand to SEQ ID NO: 2581518
ucauuagagacaugggcaa

SEQ ID NO: 2581520 - RNA, 19 nt, Artificial Sequence
  Description of Artificial Sequence: Synthetic oligonucleotide
  Sense strand starting at position 393 of SEQ ID NO: 1889149
cugggcuucccuugaggaa

SEQ ID NO: 2581521 - RNA, 19 nt, Artificial Sequence
  Description of Artificial Sequence: Synthetic oligonucleotide
  Antisense strand to SEQ ID NO: 2581520
uuccucaagggaagcccag

SEQ ID NO: 2581522 - RNA, 19 nt, Artificial Sequence
  Description of Artificial Sequence: Synthetic oligonucleotide
  Sense strand starting at position 394 of SEQ ID NO: 1889149
ugggcuucccuugaggaaa

SEQ ID NO: 2581523 - RNA, 19 nt, Artificial Sequence
  Description of Artificial Sequence: Synthetic oligonucleotide
  Antisense strand to SEQ ID NO: 2581522
uuuccucaagggaagccca

SEQ ID NO: 2581524 - RNA, 19 nt, Artificial Sequence
  Description of Artificial Sequence: Synthetic oligonucleotide
  Sense strand starting at position 632 of SEQ ID NO: 1889149
gaucauuguucuuuaggcu

SEQ ID NO: 2581525 - RNA, 19 nt, Artificial Sequence
  Description of Artificial Sequence: Synthetic oligonucleotide
  Antisense strand to SEQ ID NO: 2581524
agccuaaagaacaaugauc

SEQ ID NO: 2581526 - RNA, 19 nt, Artificial Sequence
  Description of Artificial Sequence: Synthetic oligonucleotide
  Sense strand starting at position 633 of SEQ ID NO: 1889149
aucauuguucuuuaggcua

SEQ ID NO: 2581527 - RNA, 19 nt, Artificial Sequence
  Description of Artificial Sequence: Synthetic oligonucleotide
  Antisense strand to SEQ ID NO: 2581526
uagccuaaagaacaaugau

SEQ ID NO: 2581528 - RNA, 19 nt, Artificial Sequence
  Description of Artificial Sequence: Synthetic oligonucleotide
  Sense strand starting at position 654 of SEQ ID NO: 1889149
caggcuauuccaggaagag

SEQ ID NO: 2581529 - RNA, 19 nt, Artificial Sequence
  Description of Artificial Sequence: Synthetic oligonucleotide
  Antisense strand to SEQ ID NO: 2581528
cucuuccuggaauagccug

SEQ ID NO: 2581530 - RNA, 19 nt, Artificial Sequence
  Description of Artificial Sequence: Synthetic oligonucleotide
  Sense strand starting at position 1174 of SEQ ID NO: 1889149
gcaacugacagugguaacu

SEQ ID NO: 2581531 - RNA, 19 nt, Artificial Sequence
  Description of Artificial Sequence: Synthetic oligonucleotide
  Antisense strand to SEQ ID NO: 2581530
aguuaccacugucaguugc

SEQ ID NO: 2581532 - RNA, 19 nt, Artificial Sequence
  Description of Artificial Sequence: Synthetic oligonucleotide
  Sense strand starting at position 1203 of SEQ ID NO: 1889149
auaccugaagacugaucuu

SEQ ID NO: 2581533 - RNA, 19 nt, Artificial Sequence
  Description of Artificial Sequence: Synthetic oligonucleotide
  Antisense strand to SEQ ID NO: 2581532
aagaucagucuucagguau

SEQ ID NO: 2581534 - RNA, 19 nt, Artificial Sequence
  Description of Artificial Sequence: Synthetic oligonucleotide
  Sense strand starting at position 1323 of SEQ ID NO: 1889149
ggccaaaucagauggauca

SEQ ID NO: 2581535 - RNA, 19 nt, Artificial Sequence
  Description of Artificial Sequence: Synthetic oligonucleotide
  Antisense strand to SEQ ID NO: 2581534
ugauccaucugauuuggcc

SEQ ID NO: 2581536 - RNA, 19 nt, Artificial Sequence
  Description of Artificial Sequence: Synthetic oligonucleotide
  Sense strand starting at position 1324 of SEQ ID NO: 1889149
gccaaaucagauggaucau

SEQ ID NO: 2581537 - RNA, 19 nt, Artificial Sequence
  Description of Artificial Sequence: Synthetic oligonucleotide
  Antisense strand to SEQ ID NO: 2581536
augauccaucugauuuggc

SEQ ID NO: 2581538 - RNA, 19 nt, Artificial Sequence
  Description of Artificial Sequence: Synthetic oligonucleotide
  Sense strand starting at position 1379 of SEQ ID NO: 1889149
gaagaauccuggucucuac

SEQ ID NO: 2581539 - RNA, 19 nt, Artificial Sequence
  Description of Artificial Sequence: Synthetic oligonucleotide
  Antisense strand to SEQ ID NO: 2581538
guagagaccaggauucuuc

SEQ ID NO: 2581540 - RNA, 19 nt, Artificial Sequence
  Description of Artificial Sequence: Synthetic oligonucleotide
  Sense strand starting at position 1505 of SEQ ID NO: 1889149
agcugagauugugcaaaca

SEQ ID NO: 2581541 - RNA, 19 nt, Artificial Sequence
  Description of Artificial Sequence: Synthetic oligonucleotide
  Antisense strand to SEQ ID NO: 2581540
uguuugcacaaucucagcu

SEQ ID NO: 2581542 - RNA, 19 nt, Artificial Sequence
  Description of Artificial Sequence: Synthetic oligonucleotide
  Sense strand starting at position 1595 of SEQ ID NO: 1889149
ccuggagauuacucuuuau

SEQ ID NO: 2581543 - RNA, 19 nt, Artificial Sequence
  Description of Artificial Sequence: Synthetic oligonucleotide
  Antisense strand to SEQ ID NO: 2581542
auaaagaguaaucuccagg

SEQ ID NO: 2581544 - RNA, 19 nt, Artificial Sequence
  Description of Artificial Sequence: Synthetic oligonucleotide
  Sense strand starting at position 1598 of SEQ ID NO: 1889149
ggagauuacucuuuaucua

SEQ ID NO: 2581545 - RNA, 19 nt, Artificial Sequence
  Description of Artificial Sequence: Synthetic oligonucleotide
  Antisense strand to SEQ ID NO: 2581544
uagauaaagaguaaucucc

SEQ ID NO: 2581546 - RNA, 19 nt, Artificial Sequence
  Description of Artificial Sequence: Synthetic oligonucleotide
  Sense strand starting at position 1605 of SEQ ID NO: 1889149
acucuuuaucuaugaggaa

SEQ ID NO: 2581547 - RNA, 19 nt, Artificial Sequence
  Description of Artificial Sequence: Synthetic oligonucleotide
  Antisense strand to SEQ ID NO: 2581546
uuccucauagauaaagagu

SEQ ID NO: 2581548 - RNA, 19 nt, Artificial Sequence
  Description of Artificial Sequence: Synthetic oligonucleotide
  Sense strand starting at position 1831 of SEQ ID NO: 1889149
uauguaagucgccaguaaa

SEQ ID NO: 2581549 - RNA, 19 nt, Artificial Sequence
  Description of Artificial Sequence: Synthetic oligonucleotide
  Antisense strand to SEQ ID NO: 2581548
uuuacuggcgacuuacaua

SEQ ID NO: 2581550 - RNA, 19 nt, Artificial Sequence
  Description of Artificial Sequence: Synthetic oligonucleotide
  Sense strand starting at position 1873 of SEQ ID NO: 1889149
cugaguuucuucuuugaca

SEQ ID NO: 2581551 - RNA, 19 nt, Artificial Sequence
  Description of Artificial Sequence: Synthetic oligonucleotide
  Antisense strand to SEQ ID NO: 2581550
ugucaaagaagaaacucag

SEQ ID NO: 2581552 - RNA, 19 nt, Artificial Sequence
  Description of Artificial Sequence: Synthetic oligonucleotide
  Sense strand starting at position 1874 of SEQ ID NO: 1889149
ugaguuucuucuuugacau

SEQ ID NO: 2581553 - RNA, 19 nt, Artificial Sequence
  Description of Artificial Sequence: Synthetic oligonucleotide
  Antisense strand to SEQ ID NO: 2581552
augucaaagaagaaacuca

SEQ ID NO: 2581554 - RNA, 19 nt, Artificial Sequence
  Description of Artificial Sequence: Synthetic oligonucleotide
  Sense strand starting at position 1881 of SEQ ID NO: 1889149
cuucuuugacaucgugaac

SEQ ID NO: 2581555 - RNA, 19 nt, Artificial Sequence
  Description of Artificial Sequence: Synthetic oligonucleotide
  Antisense strand to SEQ ID NO: 2581554
guucacgaugucaaagaag

SEQ ID NO: 2581556 - RNA, 19 nt, Artificial Sequence
  Description of Artificial Sequence: Synthetic oligonucleotide
  Sense strand starting at position 1906 of SEQ ID NO: 1889149
ccauuuacaugggagucaa

SEQ ID NO: 2581557 - RNA, 19 nt, Artificial Sequence
  Description of Artificial Sequence: Synthetic oligonucleotide
  Antisense strand to SEQ ID NO: 2581556
uugacucccauguaaaugg

SEQ ID NO: 2581558 - RNA, 19 nt, Artificial Sequence
  Description of Artificial Sequence: Synthetic oligonucleotide
  Sense strand starting at position 1917 of SEQ ID NO: 1889149
ggagucaaauuugacacaa

SEQ ID NO: 2581559 - RNA, 19 nt, Artificial Sequence
  Description of Artificial Sequence: Synthetic oligonucleotide
  Antisense strand to SEQ ID NO: 2581558
uugugucaaauuugacucc

SEQ ID NO: 2581560 - RNA, 19 nt, Artificial Sequence
  Description of Artificial Sequence: Synthetic oligonucleotide
  Sense strand starting at position 1996 of SEQ ID NO: 1889149
gcaucagcuacagaaggau

SEQ ID NO: 2581561 - RNA, 19 nt, Artificial Sequence
  Description of Artificial Sequence: Synthetic oligonucleotide
  Antisense strand to SEQ ID NO: 2581560
auccuucuguagcugaugc

SEQ ID NO: 2581562 - RNA, 19 nt, Artificial Sequence
  Description of Artificial Sequence: Synthetic oligonucleotide
  Sense strand starting at position 2096 of SEQ ID NO: 1889149
gaaacacgucauggucaga

SEQ ID NO: 2581563 - RNA, 19 nt, Artificial Sequence
  Description of Artificial Sequence: Synthetic oligonucleotide
  Antisense strand to SEQ ID NO: 2581562
ucugaccaugacguguuuc

SEQ ID NO: 2581564 - RNA, 19 nt, Artificial Sequence
  Description of Artificial Sequence: Synthetic oligonucleotide
  Sense strand starting at position 2285 of SEQ ID NO: 1889149
ucacuuaguccuggagcaa

SEQ ID NO: 2581565 - RNA, 19 nt, Artificial Sequence
  Description of Artificial Sequence: Synthetic oligonucleotide
  Antisense strand to SEQ ID NO: 2581564
uugcuccaggacuaaguga

SEQ ID NO: 2581566 - RNA, 19 nt, Artificial Sequence
  Description of Artificial Sequence: Synthetic oligonucleotide
  Sense strand starting at position 2286 of SEQ ID NO: 1889149
cacuuaguccuggagcaac

SEQ ID NO: 2581567 - RNA, 19 nt, Artificial Sequence
  Description of Artificial Sequence: Synthetic oligonucleotide
  Antisense strand to SEQ ID NO: 2581566
guugcuccaggacuaagug

SEQ ID NO: 2581568 - RNA, 19 nt, Artificial Sequence
  Description of Artificial Sequence: Synthetic oligonucleotide
  Sense strand starting at position 2332 of SEQ ID NO: 1889149
cugugaucaugagcuacua

SEQ ID NO: 2581569 - RNA, 19 nt, Artificial Sequence
  Description of Artificial Sequence: Synthetic oligonucleotide
  Antisense strand to SEQ ID NO: 2581568
uaguagcucaugaucacag

SEQ ID NO: 2581570 - RNA, 19 nt, Artificial Sequence
  Description of Artificial Sequence: Synthetic oligonucleotide
  Sense strand starting at position 2526 of SEQ ID NO: 1889149
uucuauccucagugugaga

SEQ ID NO: 2581571 - RNA, 19 nt, Artificial Sequence
  Description of Artificial Sequence: Synthetic oligonucleotide
  Antisense strand to SEQ ID NO: 2581570
ucucacacugaggauagaa

SEQ ID NO: 2581572 - RNA, 19 nt, Artificial Sequence
  Description of Artificial Sequence: Synthetic oligonucleotide
  Sense strand starting at position 2537 of SEQ ID NO: 1889149
gugugagagcaccaaauga

SEQ ID NO: 2581573 - RNA, 19 nt, Artificial Sequence
  Description of Artificial Sequence: Synthetic oligonucleotide
  Antisense strand to SEQ ID NO: 2581572
ucauuuggugcucucacac

SEQ ID NO: 2581574 - RNA, 19 nt, Artificial Sequence
  Description of Artificial Sequence: Synthetic oligonucleotide
  Sense strand starting at position 2576 of SEQ ID NO: 1889149
guguaucuaucaguaauua

SEQ ID NO: 2581575 - RNA, 19 nt, Artificial Sequence
  Description of Artificial Sequence: Synthetic oligonucleotide
  Antisense strand to SEQ ID NO: 2581574
uaauuacugauagauacac

SEQ ID NO: 2581576 - RNA, 19 nt, Artificial Sequence
  Description of Artificial Sequence: Synthetic oligonucleotide
  Sense strand starting at position 2711 of SEQ ID NO: 1889149
aauugaagguaucuuuguu

SEQ ID NO: 2581577 - RNA, 19 nt, Artificial Sequence
  Description of Artificial Sequence: Synthetic oligonucleotide
  Antisense strand to SEQ ID NO: 2581576
aacaaagauaccuucaauu

SEQ ID NO: 2581578 - RNA, 19 nt, Artificial Sequence
  Description of Artificial Sequence: Synthetic oligonucleotide
  Sense strand starting at position 2715 of SEQ ID NO: 1889149
gaagguaucuuuguuaacu

SEQ ID NO: 2581579 - RNA, 19 nt, Artificial Sequence
  Description of Artificial Sequence: Synthetic oligonucleotide
  Antisense strand to SEQ ID NO: 2581578
aguuaacaaagauaccuuc

SEQ ID NO: 2581580 - RNA, 19 nt, Artificial Sequence
  Description of Artificial Sequence: Synthetic oligonucleotide
  Sense strand starting at position 2785 of SEQ ID NO: 1889149
guuauuauuguaggaauug

SEQ ID NO: 2581581 - RNA, 19 nt, Artificial Sequence
  Description of Artificial Sequence: Synthetic oligonucleotide
  Antisense strand to SEQ ID NO: 2581580
caauuccuacaauaauaac

SEQ ID NO: 2581582 - RNA, 19 nt, Artificial Sequence
  Description of Artificial Sequence: Synthetic oligonucleotide
  Sense strand starting at position 3109 of SEQ ID NO: 1889149
aaaguuguaccuugagacu

SEQ ID NO: 2581583 - RNA, 19 nt, Artificial Sequence
  Description of Artificial Sequence: Synthetic oligonucleotide
  Antisense strand to SEQ ID NO: 2581582
agucucaagguacaacuuu

SEQ ID NO: 2581584 - RNA, 19 nt, Artificial Sequence
  Description of Artificial Sequence: Synthetic oligonucleotide
  Sense strand starting at position 3118 of SEQ ID NO: 1889149
ccuugagacuaauaagaac

SEQ ID NO: 2581585 - RNA, 19 nt, Artificial Sequence
  Description of Artificial Sequence: Synthetic oligonucleotide
  Antisense strand to SEQ ID NO: 2581584
guucuuauuagucucaagg

SEQ ID NO: 2581586 - RNA, 19 nt, Artificial Sequence
  Description of Artificial Sequence: Synthetic oligonucleotide
  Sense strand starting at position 3121 of SEQ ID NO: 1889149
ugagacuaauaagaacaaa

SEQ ID NO: 2581587 - RNA, 19 nt, Artificial Sequence
  Description of Artificial Sequence: Synthetic oligonucleotide
  Antisense strand to SEQ ID NO: 2581586
uuuguucuuauuagucuca

SEQ ID NO: 2581588 - RNA, 19 nt, Artificial Sequence
  Description of Artificial Sequence: Synthetic oligonucleotide
  Sense strand starting at position 3189 of SEQ ID NO: 1889149
ggauauuuauagcacuaua

SEQ ID NO: 2581589 - RNA, 19 nt, Artificial Sequence
  Description of Artificial Sequence: Synthetic oligonucleotide
  Antisense strand to SEQ ID NO: 2581588
uauagugcuauaaauaucc

SEQ ID NO: 2581590 - RNA, 19 nt, Artificial Sequence
  Description of Artificial Sequence: Synthetic oligonucleotide
  Sense strand starting at position 3656 of SEQ ID NO: 1889149
auaauaggcucugaauuug

SEQ ID NO: 2581591 - RNA, 19 nt, Artificial Sequence
  Description of Artificial Sequence: Synthetic oligonucleotide
  Antisense strand to SEQ ID NO: 2581590
caaauucagagccuauuau

SEQ ID NO: 2581592 - RNA, 19 nt, Artificial Sequence
  Description of Artificial Sequence: Synthetic oligonucleotide
  Sense strand starting at position 112 of SEQ ID NO: 1889152
agguaugaguggucccuga

SEQ ID NO: 2581593 - RNA, 19 nt, Artificial Sequence
  Description of Artificial Sequence: Synthetic oligonucleotide
  Antisense strand to SEQ ID NO: 2581592
ucagggaccacucauaccu

SEQ ID NO: 2581594 - RNA, 19 nt, Artificial Sequence
  Description of Artificial Sequence: Synthetic oligonucleotide
  Sense strand starting at position 254 of SEQ ID NO: 1889152
gccagucacugagugacuu

SEQ ID NO: 2581595 - RNA, 19 nt, Artificial Sequence
  Description of Artificial Sequence: Synthetic oligonucleotide
  Antisense strand to SEQ ID NO: 2581594
aagucacucagugacuggc

SEQ ID NO: 2581596 - RNA, 19 nt, Artificial Sequence
  Description of Artificial Sequence: Synthetic oligonucleotide
  Sense strand starting at position 265 of SEQ ID NO: 1889152
agugacuuccauugcccau

SEQ ID NO: 2581597 - RNA, 19 nt, Artificial Sequence
  Description of Artificial Sequence: Synthetic oligonucleotide
  Antisense strand to SEQ ID NO: 2581596
augggcaauggaagucacu

SEQ ID NO: 2581598 - RNA, 19 nt, Artificial Sequence
  Description of Artificial Sequence: Synthetic oligonucleotide
  Sense strand starting at position 276 of SEQ ID NO: 1889152
uugcccaugucucuaauga

SEQ ID NO: 2581599 - RNA, 19 nt, Artificial Sequence
  Description of Artificial Sequence: Synthetic oligonucleotide
  Antisense strand to SEQ ID NO: 2581598
ucauuagagacaugggcaa

SEQ ID NO: 2581600 - RNA, 19 nt, Artificial Sequence
  Description of Artificial Sequence: Synthetic oligonucleotide
  Sense strand starting at position 393 of SEQ ID NO: 1889152
cugggcuucccuugaggaa

SEQ ID NO: 2581601 - RNA, 19 nt, Artificial Sequence
  Description of Artificial Sequence: Synthetic oligonucleotide
  Antisense strand to SEQ ID NO: 2581600
uuccucaagggaagcccag

SEQ ID NO: 2581602 - RNA, 19 nt, Artificial Sequence
  Description of Artificial Sequence: Synthetic oligonucleotide
  Sense strand starting at position 394 of SEQ ID NO: 1889152
ugggcuucccuugaggaaa

SEQ ID NO: 2581603 - RNA, 19 nt, Artificial Sequence
  Description of Artificial Sequence: Synthetic oligonucleotide
  Antisense strand to SEQ ID NO: 2581602
uuuccucaagggaagccca

SEQ ID NO: 2581604 - RNA, 19 nt, Artificial Sequence
  Description of Artificial Sequence: Synthetic oligonucleotide
  Sense strand starting at position 632 of SEQ ID NO: 1889152
gaucauuguucuuuaggcu

SEQ ID NO: 2581605 - RNA, 19 nt, Artificial Sequence
  Description of Artificial Sequence: Synthetic oligonucleotide
  Antisense strand to SEQ ID NO: 2581604
agccuaaagaacaaugauc

SEQ ID NO: 2581606 - RNA, 19 nt, Artificial Sequence
  Description of Artificial Sequence: Synthetic oligonucleotide
  Sense strand starting at position 633 of SEQ ID NO: 1889152
aucauuguucuuuaggcua

SEQ ID NO: 2581607 - RNA, 19 nt, Artificial Sequence
  Description of Artificial Sequence: Synthetic oligonucleotide
  Antisense strand to SEQ ID NO: 2581606
uagccuaaagaacaaugau

SEQ ID NO: 2581608 - RNA, 19 nt, Artificial Sequence
  Description of Artificial Sequence: Synthetic oligonucleotide
  Sense strand starting at position 654 of SEQ ID NO: 1889152
caggcuauuccaggaagag

SEQ ID NO: 2581609 - RNA, 19 nt, Artificial Sequence
  Description of Artificial Sequence: Synthetic oligonucleotide
  Antisense strand to SEQ ID NO: 2581608
cucuuccuggaauagccug

SEQ ID NO: 2581610 - RNA, 19 nt, Artificial Sequence
  Description of Artificial Sequence: Synthetic oligonucleotide
  Sense strand starting at position 1174 of SEQ ID NO: 1889152
gcaacugacagugguaacu

SEQ ID NO: 2581611 - RNA, 19 nt, Artificial Sequence
  Description of Artificial Sequence: Synthetic oligonucleotide
  Antisense strand to SEQ ID NO: 2581610
aguuaccacugucaguugc

SEQ ID NO: 2581612 - RNA, 19 nt, Artificial Sequence
  Description of Artificial Sequence: Synthetic oligonucleotide
  Sense strand starting at position 1203 of SEQ ID NO: 1889152
auaccugaagacugaucuu

SEQ ID NO: 2581613 - RNA, 19 nt, Artificial Sequence
  Description of Artificial Sequence: Synthetic oligonucleotide
  Antisense strand to SEQ ID NO: 2581612
aagaucagucuucagguau

SEQ ID NO: 2581614 - RNA, 19 nt, Artificial Sequence
  Description of Artificial Sequence: Synthetic oligonucleotide
  Sense strand starting at position 1323 of SEQ ID NO: 1889152
ggccaaaucagauggauca

SEQ ID NO: 2581615 - RNA, 19 nt, Artificial Sequence
  Description of Artificial Sequence: Synthetic oligonucleotide
  Antisense strand to SEQ ID NO: 2581614
ugauccaucugauuuggcc

SEQ ID NO: 2581616 - RNA, 19 nt, Artificial Sequence
  Description of Artificial Sequence: Synthetic oligonucleotide
  Sense strand starting at position 1324 of SEQ ID NO: 1889152
gccaaaucagauggaucau

SEQ ID NO: 2581617 - RNA, 19 nt, Artificial Sequence
  Description of Artificial Sequence: Synthetic oligonucleotide
  Antisense strand to SEQ ID NO: 2581616
augauccaucugauuuggc

SEQ ID NO: 2581618 - RNA, 19 nt, Artificial Sequence
  Description of Artificial Sequence: Synthetic oligonucleotide
  Sense strand starting at position 1379 of SEQ ID NO: 1889152
gaagaauccuggucucuac

SEQ ID NO: 2581619 - RNA, 19 nt, Artificial Sequence
  Description of Artificial Sequence: Synthetic oligonucleotide
  Antisense strand to SEQ ID NO: 2581618
guagagaccaggauucuuc

SEQ ID NO: 2581620 - RNA, 19 nt, Artificial Sequence
  Description of Artificial Sequence: Synthetic oligonucleotide
  Sense strand starting at position 1505 of SEQ ID NO: 1889152
agcugagauugugcaaaca

SEQ ID NO: 2581621 - RNA, 19 nt, Artificial Sequence
  Description of Artificial Sequence: Synthetic oligonucleotide
  Antisense strand to SEQ ID NO: 2581620
uguuugcacaaucucagcu

SEQ ID NO: 2581622 - RNA, 19 nt, Artificial Sequence
  Description of Artificial Sequence: Synthetic oligonucleotide
  Sense strand starting at position 1595 of SEQ ID NO: 1889152
ccuggagauuacucuuuau

SEQ ID NO: 2581623 - RNA, 19 nt, Artificial Sequence
  Description of Artificial Sequence: Synthetic oligonucleotide
  Antisense strand to SEQ ID NO: 2581622
auaaagaguaaucuccagg

SEQ ID NO: 2581624 - RNA, 19 nt, Artificial Sequence
  Description of Artificial Sequence: Synthetic oligonucleotide
  Sense strand starting at position 1598 of SEQ ID NO: 1889152
ggagauuacucuuuaucua

SEQ ID NO: 2581625 - RNA, 19 nt, Artificial Sequence
  Description of Artificial Sequence: Synthetic oligonucleotide
  Antisense strand to SEQ ID NO: 2581624
uagauaaagaguaaucucc

SEQ ID NO: 2581626 - RNA, 19 nt, Artificial Sequence
  Description of Artificial Sequence: Synthetic oligonucleotide
  Sense strand starting at position 1605 of SEQ ID NO: 1889152
acucuuuaucuaugaggaa

SEQ ID NO: 2581627 - RNA, 19 nt, Artificial Sequence
  Description of Artificial Sequence: Synthetic oligonucleotide
  Antisense strand to SEQ ID NO: 2581626
uuccucauagauaaagagu

SEQ ID NO: 2581628 - RNA, 19 nt, Artificial Sequence
  Description of Artificial Sequence: Synthetic oligonucleotide
  Sense strand starting at position 1831 of SEQ ID NO: 1889152
uauguaagucgccaguaaa

SEQ ID NO: 2581629 - RNA, 19 nt, Artificial Sequence
  Description of Artificial Sequence: Synthetic oligonucleotide
  Antisense strand to SEQ ID NO: 2581628
uuuacuggcgacuuacaua

SEQ ID NO: 2581630 - RNA, 19 nt, Artificial Sequence
  Description of Artificial Sequence: Synthetic oligonucleotide
  Sense strand starting at position 1873 of SEQ ID NO: 1889152
cugaguuucuucuuugaca

SEQ ID NO: 2581631 - RNA, 19 nt, Artificial Sequence
  Description of Artificial Sequence: Synthetic oligonucleotide
  Antisense strand to SEQ ID NO: 2581630
ugucaaagaagaaacucag

SEQ ID NO: 2581632 - RNA, 19 nt, Artificial Sequence
  Description of Artificial Sequence: Synthetic oligonucleotide
  Sense strand starting at position 1874 of SEQ ID NO: 1889152
ugaguuucuucuuugacau

SEQ ID NO: 2581633 - RNA, 19 nt, Artificial Sequence
  Description of Artificial Sequence: Synthetic oligonucleotide
  Antisense strand to SEQ ID NO: 2581632
augucaaagaagaaacuca

SEQ ID NO: 2581634 - RNA, 19 nt, Artificial Sequence
  Description of Artificial Sequence: Synthetic oligonucleotide
  Sense strand starting at position 1881 of SEQ ID NO: 1889152
cuucuuugacaucgugaac

SEQ ID NO: 2581635 - RNA, 19 nt, Artificial Sequence
  Description of Artificial Sequence: Synthetic oligonucleotide
  Antisense strand to SEQ ID NO: 2581634
guucacgaugucaaagaag

SEQ ID NO: 2581636 - RNA, 19 nt, Artificial Sequence
  Description of Artificial Sequence: Synthetic oligonucleotide
  Sense strand starting at position 1906 of SEQ ID NO: 1889152
ccauuuacaugggagucaa

SEQ ID NO: 2581637 - RNA, 19 nt, Artificial Sequence
  Description of Artificial Sequence: Synthetic oligonucleotide
  Antisense strand to SEQ ID NO: 2581636
uugacucccauguaaaugg

SEQ ID NO: 2581638 - RNA, 19 nt, Artificial Sequence
  Description of Artificial Sequence: Synthetic oligonucleotide
  Sense strand starting at position 1917 of SEQ ID NO: 1889152
ggagucaaauuugacacaa

SEQ ID NO: 2581639 - RNA, 19 nt, Artificial Sequence
  Description of Artificial Sequence: Synthetic oligonucleotide
  Antisense strand to SEQ ID NO: 2581638
uugugucaaauuugacucc

SEQ ID NO: 2581640 - RNA, 19 nt, Artificial Sequence
  Description of Artificial Sequence: Synthetic oligonucleotide
  Sense strand starting at position 1996 of SEQ ID NO: 1889152
gcaucagcuacagaaggau

SEQ ID NO: 2581641 - RNA, 19 nt, Artificial Sequence
  Description of Artificial Sequence: Synthetic oligonucleotide
  Antisense strand to SEQ ID NO: 2581640
auccuucuguagcugaugc

SEQ ID NO: 2581642 - RNA, 19 nt, Artificial Sequence
  Description of Artificial Sequence: Synthetic oligonucleotide
  Sense strand starting at position 2096 of SEQ ID NO: 1889152
gaaacacgucauggucaga

SEQ ID NO: 2581643 - RNA, 19 nt, Artificial Sequence
  Description of Artificial Sequence: Synthetic oligonucleotide
  Antisense strand to SEQ ID NO: 2581642
ucugaccaugacguguuuc

SEQ ID NO: 2581644 - RNA, 19 nt, Artificial Sequence
  Description of Artificial Sequence: Synthetic oligonucleotide
  Sense strand starting at position 2285 of SEQ ID NO: 1889152
ucacuuaguccuggagcaa

SEQ ID NO: 2581645 - RNA, 19 nt, Artificial Sequence
  Description of Artificial Sequence: Synthetic oligonucleotide
  Antisense strand to SEQ ID NO: 2581644
uugcuccaggacuaaguga

SEQ ID NO: 2581646 - RNA, 19 nt, Artificial Sequence
  Description of Artificial Sequence: Synthetic oligonucleotide
  Sense strand starting at position 2286 of SEQ ID NO: 1889152
cacuuaguccuggagcaac

SEQ ID NO: 2581647 - RNA, 19 nt, Artificial Sequence
  Description of Artificial Sequence: Synthetic oligonucleotide
  Antisense strand to SEQ ID NO: 2581646
guugcuccaggacuaagug

SEQ ID NO: 2581648 - RNA, 19 nt, Artificial Sequence
  Description of Artificial Sequence: Synthetic oligonucleotide
  Sense strand starting at position 2332 of SEQ ID NO: 1889152
cugugaucaugagcuacua

SEQ ID NO: 2581649 - RNA, 19 nt, Artificial Sequence
  Description of Artificial Sequence: Synthetic oligonucleotide
  Antisense strand to SEQ ID NO: 2581648
uaguagcucaugaucacag

SEQ ID NO: 2581650 - RNA, 19 nt, Artificial Sequence
  Description of Artificial Sequence: Synthetic oligonucleotide
  Sense strand starting at position 2526 of SEQ ID NO: 1889152
uucuauccucagugugaga

SEQ ID NO: 2581651 - RNA, 19 nt, Artificial Sequence
  Description of Artificial Sequence: Synthetic oligonucleotide
  Antisense strand to SEQ ID NO: 2581650
ucucacacugaggauagaa

SEQ ID NO: 2581652 - RNA, 19 nt, Artificial Sequence
  Description of Artificial Sequence: Synthetic oligonucleotide
  Sense strand starting at position 2537 of SEQ ID NO: 1889152
gugugagagcaccaaauga

SEQ ID NO: 2581653 - RNA, 19 nt, Artificial Sequence
  Description of Artificial Sequence: Synthetic oligonucleotide
  Antisense strand to SEQ ID NO: 2581652
ucauuuggugcucucacac

SEQ ID NO: 2581654 - RNA, 19 nt, Artificial Sequence
  Description of Artificial Sequence: Synthetic oligonucleotide
  Sense strand starting at position 2576 of SEQ ID NO: 1889152
guguaucuaucaguaauua

SEQ ID NO: 2581655 - RNA, 19 nt, Artificial Sequence
  Description of Artificial Sequence: Synthetic oligonucleotide
  Antisense strand to SEQ ID NO: 2581654
uaauuacugauagauacac

SEQ ID NO: 2581656 - RNA, 19 nt, Artificial Sequence
  Description of Artificial Sequence: Synthetic oligonucleotide
  Sense strand starting at position 2711 of SEQ ID NO: 1889152
aauugaagguaucuuuguu

SEQ ID NO: 2581657 - RNA, 19 nt, Artificial Sequence
  Description of Artificial Sequence: Synthetic oligonucleotide
  Antisense strand to SEQ ID NO: 2581656
aacaaagauaccuucaauu

SEQ ID NO: 2581658 - RNA, 19 nt, Artificial Sequence
  Description of Artificial Sequence: Synthetic oligonucleotide
  Sense strand starting at position 2715 of SEQ ID NO: 1889152
gaagguaucuuuguuaacu

SEQ ID NO: 2581659 - RNA, 19 nt, Artificial Sequence
  Description of Artificial Sequence: Synthetic oligonucleotide
  Antisense strand to SEQ ID NO: 2581658
aguuaacaaagauaccuuc

SEQ ID NO: 2581660 - RNA, 19 nt, Artificial Sequence
  Description of Artificial Sequence: Synthetic oligonucleotide
  Sense strand starting at position 2785 of SEQ ID NO: 1889152
guuauuauuguaggaauug

SEQ ID NO: 2581661 - RNA, 19 nt, Artificial Sequence
  Description of Artificial Sequence: Synthetic oligonucleotide
  Antisense strand to SEQ ID NO: 2581660
caauuccuacaauaauaac

SEQ ID NO: 2581662 - RNA, 19 nt, Artificial Sequence
  Description of Artificial Sequence: Synthetic oligonucleotide
  Sense strand starting at position 3109 of SEQ ID NO: 1889152
aaaguuguaccuugagacu

SEQ ID NO: 2581663 - RNA, 19 nt, Artificial Sequence
  Description of Artificial Sequence: Synthetic oligonucleotide
  Antisense strand to SEQ ID NO: 2581662
agucucaagguacaacuuu

SEQ ID NO: 2581664 - RNA, 19 nt, Artificial Sequence
  Description of Artificial Sequence: Synthetic oligonucleotide
  Sense strand starting at position 3118 of SEQ ID NO: 1889152
ccuugagacuaauaagaac

SEQ ID NO: 2581665 - RNA, 19 nt, Artificial Sequence
  Description of Artificial Sequence: Synthetic oligonucleotide
  Antisense strand to SEQ ID NO: 2581664
guucuuauuagucucaagg

SEQ ID NO: 2581666 - RNA, 19 nt, Artificial Sequence
  Description of Artificial Sequence: Synthetic oligonucleotide
  Sense strand starting at position 3121 of SEQ ID NO: 1889152
ugagacuaauaagaacaaa

SEQ ID NO: 2581667 - RNA, 19 nt, Artificial Sequence
  Description of Artificial Sequence: Synthetic oligonucleotide
  Antisense strand to SEQ ID NO: 2581666
uuuguucuuauuagucuca

SEQ ID NO: 2581668 - RNA, 19 nt, Artificial Sequence
  Description of Artificial Sequence: Synthetic oligonucleotide
  Sense strand starting at position 3189 of SEQ ID NO: 1889152
ggauauuuauagcacuaua

SEQ ID NO: 2581669 - RNA, 19 nt, Artificial Sequence
  Description of Artificial Sequence: Synthetic oligonucleotide
  Antisense strand to SEQ ID NO: 2581668
uauagugcuauaaauaucc

SEQ ID NO: 2581670 - RNA, 19 nt, Artificial Sequence
  Description of Artificial Sequence: Synthetic oligonucleotide
  Sense strand starting at position 3656 of SEQ ID NO: 1889152
auaauaggcucugaauuug

SEQ ID NO: 2581671 - RNA, 19 nt, Artificial Sequence
  Description of Artificial Sequence: Synthetic oligonucleotide
  Antisense strand to SEQ ID NO: 2581670
caaauucagagccuauuau

SEQ ID NO: 2581672 - RNA, 19 nt, Artificial Sequence
  Description of Artificial Sequence: Synthetic oligonucleotide
  Sense strand starting at position 112 of SEQ ID NO: 1889155
agguaugaguggucccuga

SEQ ID NO: 2581673 - RNA, 19 nt, Artificial Sequence
  Description of Artificial Sequence: Synthetic oligonucleotide
  Antisense strand to SEQ ID NO: 2581672
ucagggaccacucauaccu

SEQ ID NO: 2581674 - RNA, 19 nt, Artificial Sequence
  Description of Artificial Sequence: Synthetic oligonucleotide
  Sense strand starting at position 254 of SEQ ID NO: 1889155
gccagucacugagugacuu

SEQ ID NO: 2581675 - RNA, 19 nt, Artificial Sequence
  Description of Artificial Sequence: Synthetic oligonucleotide
  Antisense strand to SEQ ID NO: 2581674
aagucacucagugacuggc

SEQ ID NO: 2581676 - RNA, 19 nt, Artificial Sequence
  Description of Artificial Sequence: Synthetic oligonucleotide
  Sense strand starting at position 265 of SEQ ID NO: 1889155
agugacuuccauugcccau

SEQ ID NO: 2581677 - RNA, 19 nt, Artificial Sequence
  Description of Artificial Sequence: Synthetic oligonucleotide
  Antisense strand to SEQ ID NO: 2581676
augggcaauggaagucacu

SEQ ID NO: 2581678 - RNA, 19 nt, Artificial Sequence
  Description of Artificial Sequence: Synthetic oligonucleotide
  Sense strand starting at position 276 of SEQ ID NO: 1889155
uugcccaugucucuaauga

SEQ ID NO: 2581679 - RNA, 19 nt, Artificial Sequence
  Description of Artificial Sequence: Synthetic oligonucleotide
  Antisense strand to SEQ ID NO: 2581678
ucauuagagacaugggcaa

SEQ ID NO: 2581680 - RNA, 19 nt, Artificial Sequence
  Description of Artificial Sequence: Synthetic oligonucleotide
  Sense strand starting at position 393 of SEQ ID NO: 1889155
cugggcuucccuugaggaa

SEQ ID NO: 2581681 - RNA, 19 nt, Artificial Sequence
  Description of Artificial Sequence: Synthetic oligonucleotide
  Antisense strand to SEQ ID NO: 2581680
uuccucaagggaagcccag

SEQ ID NO: 2581682 - RNA, 19 nt, Artificial Sequence
  Description of Artificial Sequence: Synthetic oligonucleotide
  Sense strand starting at position 394 of SEQ ID NO: 1889155
ugggcuucccuugaggaaa

SEQ ID NO: 2581683 - RNA, 19 nt, Artificial Sequence
  Description of Artificial Sequence: Synthetic oligonucleotide
  Antisense strand to SEQ ID NO: 2581682
uuuccucaagggaagccca

SEQ ID NO: 2581684 - RNA, 19 nt, Artificial Sequence
  Description of Artificial Sequence: Synthetic oligonucleotide
  Sense strand starting at position 632 of SEQ ID NO: 1889155
gaucauuguucuuuaggcu

SEQ ID NO: 2581685 - RNA, 19 nt, Artificial Sequence
  Description of Artificial Sequence: Synthetic oligonucleotide
  Antisense strand to SEQ ID NO: 2581684
agccuaaagaacaaugauc

SEQ ID NO: 2581686 - RNA, 19 nt, Artificial Sequence
  Description of Artificial Sequence: Synthetic oligonucleotide
  Sense strand starting at position 633 of SEQ ID NO: 1889155
aucauuguucuuuaggcua

SEQ ID NO: 2581687 - RNA, 19 nt, Artificial Sequence
  Description of Artificial Sequence: Synthetic oligonucleotide
  Antisense strand to SEQ ID NO: 2581686
uagccuaaagaacaaugau

SEQ ID NO: 2581688 - RNA, 19 nt, Artificial Sequence
  Description of Artificial Sequence: Synthetic oligonucleotide
  Sense strand starting at position 654 of SEQ ID NO: 1889155
caggcuauuccaggaagag

SEQ ID NO: 2581689 - RNA, 19 nt, Artificial Sequence
  Description of Artificial Sequence: Synthetic oligonucleotide
  Antisense strand to SEQ ID NO: 2581688
cucuuccuggaauagccug

SEQ ID NO: 2581690 - RNA, 19 nt, Artificial Sequence
  Description of Artificial Sequence: Synthetic oligonucleotide
  Sense strand starting at position 1174 of SEQ ID NO: 1889155
gcaacugacagugguaacu

SEQ ID NO: 2581691 - RNA, 19 nt, Artificial Sequence
  Description of Artificial Sequence: Synthetic oligonucleotide
  Antisense strand to SEQ ID NO: 2581690
aguuaccacugucaguugc

SEQ ID NO: 2581692 - RNA, 19 nt, Artificial Sequence
  Description of Artificial Sequence: Synthetic oligonucleotide
  Sense strand starting at position 1203 of SEQ ID NO: 1889155
auaccugaagacugaucuu

SEQ ID NO: 2581693 - RNA, 19 nt, Artificial Sequence
  Description of Artificial Sequence: Synthetic oligonucleotide
  Antisense strand to SEQ ID NO: 2581692
aagaucagucuucagguau

SEQ ID NO: 2581694 - RNA, 19 nt, Artificial Sequence
  Description of Artificial Sequence: Synthetic oligonucleotide
  Sense strand starting at position 1323 of SEQ ID NO: 1889155
ggccaaaucagauggauca

SEQ ID NO: 2581695 - RNA, 19 nt, Artificial Sequence
  Description of Artificial Sequence: Synthetic oligonucleotide
  Antisense strand to SEQ ID NO: 2581694
ugauccaucugauuuggcc

SEQ ID NO: 2581696 - RNA, 19 nt, Artificial Sequence
  Description of Artificial Sequence: Synthetic oligonucleotide
  Sense strand starting at position 1324 of SEQ ID NO: 1889155
gccaaaucagauggaucau

SEQ ID NO: 2581697 - RNA, 19 nt, Artificial Sequence
  Description of Artificial Sequence: Synthetic oligonucleotide
  Antisense strand to SEQ ID NO: 2581696
augauccaucugauuuggc

SEQ ID NO: 2581698 - RNA, 19 nt, Artificial Sequence
  Description of Artificial Sequence: Synthetic oligonucleotide
  Sense strand starting at position 1379 of SEQ ID NO: 1889155
gaagaauccuggucucuac

SEQ ID NO: 2581699 - RNA, 19 nt, Artificial Sequence
  Description of Artificial Sequence: Synthetic oligonucleotide
  Antisense strand to SEQ ID NO: 2581698
guagagaccaggauucuuc

SEQ ID NO: 2581700 - RNA, 19 nt, Artificial Sequence
  Description of Artificial Sequence: Synthetic oligonucleotide
  Sense strand starting at position 1505 of SEQ ID NO: 1889155
agcugagauugugcaaaca

SEQ ID NO: 2581701 - RNA, 19 nt, Artificial Sequence
  Description of Artificial Sequence: Synthetic oligonucleotide
  Antisense strand to SEQ ID NO: 2581700
uguuugcacaaucucagcu

SEQ ID NO: 2581702 - RNA, 19 nt, Artificial Sequence
  Description of Artificial Sequence: Synthetic oligonucleotide
  Sense strand starting at position 1595 of SEQ ID NO: 1889155
ccuggagauuacucuuuau

SEQ ID NO: 2581703 - RNA, 19 nt, Artificial Sequence
  Description of Artificial Sequence: Synthetic oligonucleotide
  Antisense strand to SEQ ID NO: 2581702
auaaagaguaaucuccagg

SEQ ID NO: 2581704 - RNA, 19 nt, Artificial Sequence
  Description of Artificial Sequence: Synthetic oligonucleotide
  Sense strand starting at position 1598 of SEQ ID NO: 1889155
ggagauuacucuuuaucua

SEQ ID NO: 2581705 - RNA, 19 nt, Artificial Sequence
  Description of Artificial Sequence: Synthetic oligonucleotide
  Antisense strand to SEQ ID NO: 2581704
uagauaaagaguaaucucc

SEQ ID NO: 2581706 - RNA, 19 nt, Artificial Sequence
  Description of Artificial Sequence: Synthetic oligonucleotide
  Sense strand starting at position 1605 of SEQ ID NO: 1889155
acucuuuaucuaugaggaa

SEQ ID NO: 2581707 - RNA, 19 nt, Artificial Sequence
  Description of Artificial Sequence: Synthetic oligonucleotide
  Antisense strand to SEQ ID NO: 2581706
uuccucauagauaaagagu

SEQ ID NO: 2581708 - RNA, 19 nt, Artificial Sequence
  Description of Artificial Sequence: Synthetic oligonucleotide
  Sense strand starting at position 1831 of SEQ ID NO: 1889155
uauguaagucgccaguaaa

SEQ ID NO: 2581709 - RNA, 19 nt, Artificial Sequence
  Description of Artificial Sequence: Synthetic oligonucleotide
  Antisense strand to SEQ ID NO: 2581708
uuuacuggcgacuuacaua

SEQ ID NO: 2581710 - RNA, 19 nt, Artificial Sequence
  Description of Artificial Sequence: Synthetic oligonucleotide
  Sense strand starting at position 1873 of SEQ ID NO: 1889155
cugaguuucuucuuugaca

SEQ ID NO: 2581711 - RNA, 19 nt, Artificial Sequence
  Description of Artificial Sequence: Synthetic oligonucleotide
  Antisense strand to SEQ ID NO: 2581710
ugucaaagaagaaacucag

SEQ ID NO: 2581712 - RNA, 19 nt, Artificial Sequence
  Description of Artificial Sequence: Synthetic oligonucleotide
  Sense strand starting at position 1874 of SEQ ID NO: 1889155
ugaguuucuucuuugacau

SEQ ID NO: 2581713 - RNA, 19 nt, Artificial Sequence
  Description of Artificial Sequence: Synthetic oligonucleotide
  Antisense strand to SEQ ID NO: 2581712
augucaaagaagaaacuca

SEQ ID NO: 2581714 - RNA, 19 nt, Artificial Sequence
  Description of Artificial Sequence: Synthetic oligonucleotide
  Sense strand starting at position 1881 of SEQ ID NO: 1889155
cuucuuugacaucgugaac

SEQ ID NO: 2581715 - RNA, 19 nt, Artificial Sequence
  Description of Artificial Sequence: Synthetic oligonucleotide
  Antisense strand to SEQ ID NO: 2581714
guucacgaugucaaagaag

SEQ ID NO: 2581716 - RNA, 19 nt, Artificial Sequence
  Description of Artificial Sequence: Synthetic oligonucleotide
  Sense strand starting at position 1906 of SEQ ID NO: 1889155
ccauuuacaugggagucaa

SEQ ID NO: 2581717 - RNA, 19 nt, Artificial Sequence
  Description of Artificial Sequence: Synthetic oligonucleotide
  Antisense strand to SEQ ID NO: 2581716
uugacucccauguaaaugg

SEQ ID NO: 2581718 - RNA, 19 nt, Artificial Sequence
  Description of Artificial Sequence: Synthetic oligonucleotide
  Sense strand starting at position 1917 of SEQ ID NO: 1889155
ggagucaaauuugacacaa

SEQ ID NO: 2581719 - RNA, 19 nt, Artificial Sequence
  Description of Artificial Sequence: Synthetic oligonucleotide
  Antisense strand to SEQ ID NO: 2581718
uugugucaaauuugacucc

SEQ ID NO: 2581720 - RNA, 19 nt, Artificial Sequence
  Description of Artificial Sequence: Synthetic oligonucleotide
  Sense strand starting at position 1996 of SEQ ID NO: 1889155
gcaucagcuacagaaggau

SEQ ID NO: 2581721 - RNA, 19 nt, Artificial Sequence
  Description of Artificial Sequence: Synthetic oligonucleotide
  Antisense strand to SEQ ID NO: 2581720
auccuucuguagcugaugc

SEQ ID NO: 2581722 - RNA, 19 nt, Artificial Sequence
  Description of Artificial Sequence: Synthetic oligonucleotide
  Sense strand starting at position 2096 of SEQ ID NO: 1889155
gaaacacgucauggucaga

SEQ ID NO: 2581723 - RNA, 19 nt, Artificial Sequence
  Description of Artificial Sequence: Synthetic oligonucleotide
  Antisense strand to SEQ ID NO: 2581722
ucugaccaugacguguuuc

SEQ ID NO: 2581724 - RNA, 19 nt, Artificial Sequence
  Description of Artificial Sequence: Synthetic oligonucleotide
  Sense strand starting at position 2285 of SEQ ID NO: 1889155
ucacuuaguccuggagcaa

SEQ ID NO: 2581725 - RNA, 19 nt, Artificial Sequence
  Description of Artificial Sequence: Synthetic oligonucleotide
  Antisense strand to SEQ ID NO: 2581724
uugcuccaggacuaaguga

SEQ ID NO: 2581726 - RNA, 19 nt, Artificial Sequence
  Description of Artificial Sequence: Synthetic oligonucleotide
  Sense strand starting at position 2286 of SEQ ID NO: 1889155
cacuuaguccuggagcaac

SEQ ID NO: 2581727 - RNA, 19 nt, Artificial Sequence
  Description of Artificial Sequence: Synthetic oligonucleotide
  Antisense strand to SEQ ID NO: 2581726
guugcuccaggacuaagug

SEQ ID NO: 2581728 - RNA, 19 nt, Artificial Sequence
  Description of Artificial Sequence: Synthetic oligonucleotide
  Sense strand starting at position 2332 of SEQ ID NO: 1889155
cugugaucaugagcuacua

SEQ ID NO: 2581729 - RNA, 19 nt, Artificial Sequence
  Description of Artificial Sequence: Synthetic oligonucleotide
  Antisense strand to SEQ ID NO: 2581728
uaguagcucaugaucacag

SEQ ID NO: 2581730 - RNA, 19 nt, Artificial Sequence
  Description of Artificial Sequence: Synthetic oligonucleotide
  Sense strand starting at position 2526 of SEQ ID NO: 1889155
uucuauccucagugugaga

SEQ ID NO: 2581731 - RNA, 19 nt, Artificial Sequence
  Description of Artificial Sequence: Synthetic oligonucleotide
  Antisense strand to SEQ ID NO: 2581730
ucucacacugaggauagaa

SEQ ID NO: 2581732 - RNA, 19 nt, Artificial Sequence
  Description of Artificial Sequence: Synthetic oligonucleotide
  Sense strand starting at position 2537 of SEQ ID NO: 1889155
gugugagagcaccaaauga

SEQ ID NO: 2581733 - RNA, 19 nt, Artificial Sequence
  Description of Artificial Sequence: Synthetic oligonucleotide
  Antisense strand to SEQ ID NO: 2581732
ucauuuggugcucucacac

SEQ ID NO: 2581734 - RNA, 19 nt, Artificial Sequence
  Description of Artificial Sequence: Synthetic oligonucleotide
  Sense strand starting at position 2576 of SEQ ID NO: 1889155
guguaucuaucaguaauua

SEQ ID NO: 2581735 - RNA, 19 nt, Artificial Sequence
  Description of Artificial Sequence: Synthetic oligonucleotide
  Antisense strand to SEQ ID NO: 2581734
uaauuacugauagauacac

SEQ ID NO: 2581736 - RNA, 19 nt, Artificial Sequence
  Description of Artificial Sequence: Synthetic oligonucleotide
  Sense strand starting at position 2711 of SEQ ID NO: 1889155
aauugaagguaucuuuguu

SEQ ID NO: 2581737 - RNA, 19 nt, Artificial Sequence
  Description of Artificial Sequence: Synthetic oligonucleotide
  Antisense strand to SEQ ID NO: 2581736
aacaaagauaccuucaauu

SEQ ID NO: 2581738 - RNA, 19 nt, Artificial Sequence
  Description of Artificial Sequence: Synthetic oligonucleotide
  Sense strand starting at position 2715 of SEQ ID NO: 1889155
gaagguaucuuuguuaacu

SEQ ID NO: 2581739 - RNA, 19 nt, Artificial Sequence
  Description of Artificial Sequence: Synthetic oligonucleotide
  Antisense strand to SEQ ID NO: 2581738
aguuaacaaagauaccuuc

SEQ ID NO: 2581740 - RNA, 19 nt, Artificial Sequence
  Description of Artificial Sequence: Synthetic oligonucleotide
  Sense strand starting at position 2785 of SEQ ID NO: 1889155
guuauuauuguaggaauug

SEQ ID NO: 2581741 - RNA, 19 nt, Artificial Sequence
  Description of Artificial Sequence: Synthetic oligonucleotide
  Antisense strand to SEQ ID NO: 2581740
caauuccuacaauaauaac

SEQ ID NO: 2581742 - RNA, 19 nt, Artificial Sequence
  Description of Artificial Sequence: Synthetic oligonucleotide
  Sense strand starting at position 3109 of SEQ ID NO: 1889155
aaaguuguaccuugagacu

SEQ ID NO: 2581743 - RNA, 19 nt, Artificial Sequence
  Description of Artificial Sequence: Synthetic oligonucleotide
  Antisense strand to SEQ ID NO: 2581742
agucucaagguacaacuuu

SEQ ID NO: 2581744 - RNA, 19 nt, Artificial Sequence
  Description of Artificial Sequence: Synthetic oligonucleotide
  Sense strand starting at position 3118 of SEQ ID NO: 1889155
ccuugagacuaauaagaac

SEQ ID NO: 2581745 - RNA, 19 nt, Artificial Sequence
  Description of Artificial Sequence: Synthetic oligonucleotide
  Antisense strand to SEQ ID NO: 2581744
guucuuauuagucucaagg

SEQ ID NO: 2581746 - RNA, 19 nt, Artificial Sequence
  Description of Artificial Sequence: Synthetic oligonucleotide
  Sense strand starting at position 3121 of SEQ ID NO: 1889155
ugagacuaauaagaacaaa

SEQ ID NO: 2581747 - RNA, 19 nt, Artificial Sequence
  Description of Artificial Sequence: Synthetic oligonucleotide
  Antisense strand to SEQ ID NO: 2581746
uuuguucuuauuagucuca

SEQ ID NO: 2581748 - RNA, 19 nt, Artificial Sequence
  Description of Artificial Sequence: Synthetic oligonucleotide
  Sense strand starting at position 3189 of SEQ ID NO: 1889155
ggauauuuauagcacuaua

SEQ ID NO: 2581749 - RNA, 19 nt, Artificial Sequence
  Description of Artificial Sequence: Synthetic oligonucleotide
  Antisense strand to SEQ ID NO: 2581748
uauagugcuauaaauaucc

SEQ ID NO: 2581750 - RNA, 19 nt, Artificial Sequence
  Description of Artificial Sequence: Synthetic oligonucleotide
  Sense strand starting at position 3656 of SEQ ID NO: 1889155
auaauaggcucugaauuug

SEQ ID NO: 2581751 - RNA, 19 nt, Artificial Sequence
  Description of Artificial Sequence: Synthetic oligonucleotide
  Antisense strand to SEQ ID NO: 2581750
caaauucagagccuauuau

SEQ ID NO: 2581752 - RNA, 19 nt, Artificial Sequence
  Description of Artificial Sequence: Synthetic oligonucleotide
  Sense strand starting at position 72 of SEQ ID NO: 1889156
auauguuacaguggauaga

SEQ ID NO: 2581753 - RNA, 19 nt, Artificial Sequence
  Description of Artificial Sequence: Synthetic oligonucleotide
  Antisense strand to SEQ ID NO: 2581752
ucuauccacuguaacauau

SEQ ID NO: 2581754 - RNA, 19 nt, Artificial Sequence
  Description of Artificial Sequence: Synthetic oligonucleotide
  Sense strand starting at position 236 of SEQ ID NO: 1889156
gccacaucccaagaagcau

SEQ ID NO: 2581755 - RNA, 19 nt, Artificial Sequence
  Description of Artificial Sequence: Synthetic oligonucleotide
  Antisense strand to SEQ ID NO: 2581754
augcuucuugggauguggc

SEQ ID NO: 2581756 - RNA, 19 nt, Artificial Sequence
  Description of Artificial Sequence: Synthetic oligonucleotide
  Sense strand starting at position 543 of SEQ ID NO: 1889156
cuguaugucccagggugaa

SEQ ID NO: 2581757 - RNA, 19 nt, Artificial Sequence
  Description of Artificial Sequence: Synthetic oligonucleotide
  Antisense strand to SEQ ID NO: 2581756
uucacccugggacauacag

SEQ ID NO: 2581758 - RNA, 19 nt, Artificial Sequence
  Description of Artificial Sequence: Synthetic oligonucleotide
  Sense strand starting at position 581 of SEQ ID NO: 1889156
gggccaagucaugaucuga

SEQ ID NO: 2581759 - RNA, 19 nt, Artificial Sequence
  Description of Artificial Sequence: Synthetic oligonucleotide
  Antisense strand to SEQ ID NO: 2581758
ucagaucaugacuuggccc

SEQ ID NO: 2581760 - RNA, 19 nt, Artificial Sequence
  Description of Artificial Sequence: Synthetic oligonucleotide
  Sense strand starting at position 672 of SEQ ID NO: 1889156
uccauuuguuguccucaga

SEQ ID NO: 2581761 - RNA, 19 nt, Artificial Sequence
  Description of Artificial Sequence: Synthetic oligonucleotide
  Antisense strand to SEQ ID NO: 2581760
ucugaggacaacaaaugga

SEQ ID NO: 2581762 - RNA, 19 nt, Artificial Sequence
  Description of Artificial Sequence: Synthetic oligonucleotide
  Sense strand starting at position 701 of SEQ ID NO: 1889156
gcuaauagaugucuauucu

SEQ ID NO: 2581763 - RNA, 19 nt, Artificial Sequence
  Description of Artificial Sequence: Synthetic oligonucleotide
  Antisense strand to SEQ ID NO: 2581762
agaauagacaucuauuagc

SEQ ID NO: 2581764 - RNA, 19 nt, Artificial Sequence
  Description of Artificial Sequence: Synthetic oligonucleotide
  Sense strand starting at position 1165 of SEQ ID NO: 1889156
aucucagugaggcaaguuu

SEQ ID NO: 2581765 - RNA, 19 nt, Artificial Sequence
  Description of Artificial Sequence: Synthetic oligonucleotide
  Antisense strand to SEQ ID NO: 2581764
aaacuugccucacugagau

SEQ ID NO: 2581766 - RNA, 19 nt, Artificial Sequence
  Description of Artificial Sequence: Synthetic oligonucleotide
  Sense strand starting at position 1227 of SEQ ID NO: 1889156
ccggcagacucuucuggau

SEQ ID NO: 2581767 - RNA, 19 nt, Artificial Sequence
  Description of Artificial Sequence: Synthetic oligonucleotide
  Antisense strand to SEQ ID NO: 2581766
auccagaagagucugccgg

SEQ ID NO: 2581768 - RNA, 19 nt, Artificial Sequence
  Description of Artificial Sequence: Synthetic oligonucleotide
  Sense strand starting at position 1239 of SEQ ID NO: 1889156
ucuggauccuuagggauuu

SEQ ID NO: 2581769 - RNA, 19 nt, Artificial Sequence
  Description of Artificial Sequence: Synthetic oligonucleotide
  Antisense strand to SEQ ID NO: 2581768
aaaucccuaaggauccaga

SEQ ID NO: 2581770 - RNA, 19 nt, Artificial Sequence
  Description of Artificial Sequence: Synthetic oligonucleotide
  Sense strand starting at position 1501 of SEQ ID NO: 1889156
gugcaaguucuugagacag

SEQ ID NO: 2581771 - RNA, 19 nt, Artificial Sequence
  Description of Artificial Sequence: Synthetic oligonucleotide
  Antisense strand to SEQ ID NO: 2581770
cugucucaagaacuugcac

SEQ ID NO: 2581772 - RNA, 19 nt, Artificial Sequence
  Description of Artificial Sequence: Synthetic oligonucleotide
  Sense strand starting at position 1701 of SEQ ID NO: 1889156
guuucaauacugugaggug

SEQ ID NO: 2581773 - RNA, 19 nt, Artificial Sequence
  Description of Artificial Sequence: Synthetic oligonucleotide
  Antisense strand to SEQ ID NO: 2581772
caccucacaguauugaaac

SEQ ID NO: 2581774 - RNA, 19 nt, Artificial Sequence
  Description of Artificial Sequence: Synthetic oligonucleotide
  Sense strand starting at position 1713 of SEQ ID NO: 1889156
ugagguguucgcuaaccac

SEQ ID NO: 2581775 - RNA, 19 nt, Artificial Sequence
  Description of Artificial Sequence: Synthetic oligonucleotide
  Antisense strand to SEQ ID NO: 2581774
gugguuagcgaacaccuca

SEQ ID NO: 2581776 - RNA, 19 nt, Artificial Sequence
  Description of Artificial Sequence: Synthetic oligonucleotide
  Sense strand starting at position 1781 of SEQ ID NO: 1889156
ccauaugaauuggaauaua

SEQ ID NO: 2581777 - RNA, 19 nt, Artificial Sequence
  Description of Artificial Sequence: Synthetic oligonucleotide
  Antisense strand to SEQ ID NO: 2581776
uauauuccaauucauaugg

SEQ ID NO: 2581778 - RNA, 19 nt, Artificial Sequence
  Description of Artificial Sequence: Synthetic oligonucleotide
  Sense strand starting at position 1803 of SEQ ID NO: 1889156
uggugaguuguugaagggu

SEQ ID NO: 2581779 - RNA, 19 nt, Artificial Sequence
  Description of Artificial Sequence: Synthetic oligonucleotide
  Antisense strand to SEQ ID NO: 2581778
acccuucaacaacucacca

SEQ ID NO: 2581780 - RNA, 19 nt, Artificial Sequence
  Description of Artificial Sequence: Synthetic oligonucleotide
  Sense strand starting at position 1998 of SEQ ID NO: 1889156
uggucucacagguacagau

SEQ ID NO: 2581781 - RNA, 19 nt, Artificial Sequence
  Description of Artificial Sequence: Synthetic oligonucleotide
  Antisense strand to SEQ ID NO: 2581780
aucuguaccugugagacca

SEQ ID NO: 2581782 - RNA, 19 nt, Artificial Sequence
  Description of Artificial Sequence: Synthetic oligonucleotide
  Sense strand starting at position 2036 of SEQ ID NO: 1889156
agaggucaucuguggugau

SEQ ID NO: 2581783 - RNA, 19 nt, Artificial Sequence
  Description of Artificial Sequence: Synthetic oligonucleotide
  Antisense strand to SEQ ID NO: 2581782
aucaccacagaugaccucu

SEQ ID NO: 2581784 - RNA, 19 nt, Artificial Sequence
  Description of Artificial Sequence: Synthetic oligonucleotide
  Sense strand starting at position 2061 of SEQ ID NO: 1889156
ccuagaaagguccaguguu

SEQ ID NO: 2581785 - RNA, 19 nt, Artificial Sequence
  Description of Artificial Sequence: Synthetic oligonucleotide
  Antisense strand to SEQ ID NO: 2581784
aacacuggaccuuucuagg

SEQ ID NO: 2581786 - RNA, 19 nt, Artificial Sequence
  Description of Artificial Sequence: Synthetic oligonucleotide
  Sense strand starting at position 2138 of SEQ ID NO: 1889156
agagaaugagcuuacuugu

SEQ ID NO: 2581787 - RNA, 19 nt, Artificial Sequence
  Description of Artificial Sequence: Synthetic oligonucleotide
  Antisense strand to SEQ ID NO: 2581786
acaaguaagcucauucucu

SEQ ID NO: 2581788 - RNA, 19 nt, Artificial Sequence
  Description of Artificial Sequence: Synthetic oligonucleotide
  Sense strand starting at position 2144 of SEQ ID NO: 1889156
ugagcuuacuuguccugga

SEQ ID NO: 2581789 - RNA, 19 nt, Artificial Sequence
  Description of Artificial Sequence: Synthetic oligonucleotide
  Antisense strand to SEQ ID NO: 2581788
uccaggacaaguaagcuca

SEQ ID NO: 2581790 - RNA, 19 nt, Artificial Sequence
  Description of Artificial Sequence: Synthetic oligonucleotide
  Sense strand starting at position 2149 of SEQ ID NO: 1889156
uuacuuguccuggagucca

SEQ ID NO: 2581791 - RNA, 19 nt, Artificial Sequence
  Description of Artificial Sequence: Synthetic oligonucleotide
  Antisense strand to SEQ ID NO: 2581790
uggacuccaggacaaguaa

SEQ ID NO: 2581792 - RNA, 19 nt, Artificial Sequence
  Description of Artificial Sequence: Synthetic oligonucleotide
  Sense strand starting at position 2297 of SEQ ID NO: 1889156
uccugaaaucaauggcauc

SEQ ID NO: 2581793 - RNA, 19 nt, Artificial Sequence
  Description of Artificial Sequence: Synthetic oligonucleotide
  Antisense strand to SEQ ID NO: 2581792
gaugccauugauuucagga

SEQ ID NO: 2581794 - RNA, 19 nt, Artificial Sequence
  Description of Artificial Sequence: Synthetic oligonucleotide
  Sense strand starting at position 2445 of SEQ ID NO: 1889156
ucucauaguacgggaauca

SEQ ID NO: 2581795 - RNA, 19 nt, Artificial Sequence
  Description of Artificial Sequence: Synthetic oligonucleotide
  Antisense strand to SEQ ID NO: 2581794
ugauucccguacuaugaga

SEQ ID NO: 2581796 - RNA, 19 nt, Artificial Sequence
  Description of Artificial Sequence: Synthetic oligonucleotide
  Sense strand starting at position 2465 of SEQ ID NO: 1889156
gcaucccucccauagaagu

SEQ ID NO: 2581797 - RNA, 19 nt, Artificial Sequence
  Description of Artificial Sequence: Synthetic oligonucleotide
  Antisense strand to SEQ ID NO: 2581796
acuucuaugggagggaugc

SEQ ID NO: 2581798 - RNA, 19 nt, Artificial Sequence
  Description of Artificial Sequence: Synthetic oligonucleotide
  Sense strand starting at position 2487 of SEQ ID NO: 1889156
agaacaaugucuccauguu

SEQ ID NO: 2581799 - RNA, 19 nt, Artificial Sequence
  Description of Artificial Sequence: Synthetic oligonucleotide
  Antisense strand to SEQ ID NO: 2581798
aacauggagacauuguucu

SEQ ID NO: 2581800 - RNA, 19 nt, Artificial Sequence
  Description of Artificial Sequence: Synthetic oligonucleotide
  Sense strand starting at position 2488 of SEQ ID NO: 1889156
gaacaaugucuccauguug

SEQ ID NO: 2581801 - RNA, 19 nt, Artificial Sequence
  Description of Artificial Sequence: Synthetic oligonucleotide
  Antisense strand to SEQ ID NO: 2581800
caacauggagacauuguuc

SEQ ID NO: 2581802 - RNA, 19 nt, Artificial Sequence
  Description of Artificial Sequence: Synthetic oligonucleotide
  Sense strand starting at position 2502 of SEQ ID NO: 1889156
uguuguuggcuguaaugga

SEQ ID NO: 2581803 - RNA, 19 nt, Artificial Sequence
  Description of Artificial Sequence: Synthetic oligonucleotide
  Antisense strand to SEQ ID NO: 2581802
uccauuacagccaacaaca

SEQ ID NO: 2581804 - RNA, 19 nt, Artificial Sequence
  Description of Artificial Sequence: Synthetic oligonucleotide
  Sense strand starting at position 2506 of SEQ ID NO: 1889156
guuggcuguaauggaaaua

SEQ ID NO: 2581805 - RNA, 19 nt, Artificial Sequence
  Description of Artificial Sequence: Synthetic oligonucleotide
  Antisense strand to SEQ ID NO: 2581804
uauuuccauuacagccaac

SEQ ID NO: 2581806 - RNA, 19 nt, Artificial Sequence
  Description of Artificial Sequence: Synthetic oligonucleotide
  Sense strand starting at position 2517 of SEQ ID NO: 1889156
uggaaauaagguuguaaau

SEQ ID NO: 2581807 - RNA, 19 nt, Artificial Sequence
  Description of Artificial Sequence: Synthetic oligonucleotide
  Antisense strand to SEQ ID NO: 2581806
auuuacaaccuuauuucca

SEQ ID NO: 2581808 - RNA, 19 nt, Artificial Sequence
  Description of Artificial Sequence: Synthetic oligonucleotide
  Sense strand starting at position 2815 of SEQ ID NO: 1889156
uuuccugaaaguuggagua

SEQ ID NO: 2581809 - RNA, 19 nt, Artificial Sequence
  Description of Artificial Sequence: Synthetic oligonucleotide
  Antisense strand to SEQ ID NO: 2581808
uacuccaacuuucaggaaa

SEQ ID NO: 2581810 - RNA, 19 nt, Artificial Sequence
  Description of Artificial Sequence: Synthetic oligonucleotide
  Sense strand starting at position 2983 of SEQ ID NO: 1889156
ucaccuguuugaccuuauu

SEQ ID NO: 2581811 - RNA, 19 nt, Artificial Sequence
  Description of Artificial Sequence: Synthetic oligonucleotide
  Antisense strand to SEQ ID NO: 2581810
aauaaggucaaacagguga

SEQ ID NO: 2581812 - RNA, 19 nt, Artificial Sequence
  Description of Artificial Sequence: Synthetic oligonucleotide
  Sense strand starting at position 2986 of SEQ ID NO: 1889156
ccuguuugaccuuauugca

SEQ ID NO: 2581813 - RNA, 19 nt, Artificial Sequence
  Description of Artificial Sequence: Synthetic oligonucleotide
  Antisense strand to SEQ ID NO: 2581812
ugcaauaaggucaaacagg

SEQ ID NO: 2581814 - RNA, 19 nt, Artificial Sequence
  Description of Artificial Sequence: Synthetic oligonucleotide
  Sense strand starting at position 3085 of SEQ ID NO: 1889156
gaaaccgaauuugagauaa

SEQ ID NO: 2581815 - RNA, 19 nt, Artificial Sequence
  Description of Artificial Sequence: Synthetic oligonucleotide
  Antisense strand to SEQ ID NO: 2581814
uuaucucaaauucgguuuc

SEQ ID NO: 2581816 - RNA, 19 nt, Artificial Sequence
  Description of Artificial Sequence: Synthetic oligonucleotide
  Sense strand starting at position 3111 of SEQ ID NO: 1889156
ggucuauguggacaagacu

SEQ ID NO: 2581817 - RNA, 19 nt, Artificial Sequence
  Description of Artificial Sequence: Synthetic oligonucleotide
  Antisense strand to SEQ ID NO: 2581816
agucuuguccacauagacc

SEQ ID NO: 2581818 - RNA, 19 nt, Artificial Sequence
  Description of Artificial Sequence: Synthetic oligonucleotide
  Sense strand starting at position 3140 of SEQ ID NO: 1889156
cucucuggauuggucauau

SEQ ID NO: 2581819 - RNA, 19 nt, Artificial Sequence
  Description of Artificial Sequence: Synthetic oligonucleotide
  Antisense strand to SEQ ID NO: 2581818
auaugaccaauccagagag

SEQ ID NO: 2581820 - RNA, 19 nt, Artificial Sequence
  Description of Artificial Sequence: Synthetic oligonucleotide
  Sense strand starting at position 3152 of SEQ ID NO: 1889156
gucauauugcaaugaaaca

SEQ ID NO: 2581821 - RNA, 19 nt, Artificial Sequence
  Description of Artificial Sequence: Synthetic oligonucleotide
  Antisense strand to SEQ ID NO: 2581820
uguuucauugcaauaugac

SEQ ID NO: 2581822 - RNA, 19 nt, Artificial Sequence
  Description of Artificial Sequence: Synthetic oligonucleotide
  Sense strand starting at position 3214 of SEQ ID NO: 1889156
cuagaagagugccuuuauu

SEQ ID NO: 2581823 - RNA, 19 nt, Artificial Sequence
  Description of Artificial Sequence: Synthetic oligonucleotide
  Antisense strand to SEQ ID NO: 2581822
aauaaaggcacucuucuag

SEQ ID NO: 2581824 - RNA, 19 nt, Artificial Sequence
  Description of Artificial Sequence: Synthetic oligonucleotide
  Sense strand starting at position 3536 of SEQ ID NO: 1889156
gaggcugucucauucuaua

SEQ ID NO: 2581825 - RNA, 19 nt, Artificial Sequence
  Description of Artificial Sequence: Synthetic oligonucleotide
  Antisense strand to SEQ ID NO: 2581824
uauagaaugagacagccuc

SEQ ID NO: 2581826 - RNA, 19 nt, Artificial Sequence
  Description of Artificial Sequence: Synthetic oligonucleotide
  Sense strand starting at position 3773 of SEQ ID NO: 1889156
guacuaucugguggauaac

SEQ ID NO: 2581827 - RNA, 19 nt, Artificial Sequence
  Description of Artificial Sequence: Synthetic oligonucleotide
  Antisense strand to SEQ ID NO: 2581826
guuauccaccagauaguac

SEQ ID NO: 2581828 - RNA, 19 nt, Artificial Sequence
  Description of Artificial Sequence: Synthetic oligonucleotide
  Sense strand starting at position 3799 of SEQ ID NO: 1889156
agacgaguccaccacugau

SEQ ID NO: 2581829 - RNA, 19 nt, Artificial Sequence
  Description of Artificial Sequence: Synthetic oligonucleotide
  Antisense strand to SEQ ID NO: 2581828
aucagugguggacucgucu

SEQ ID NO: 2581830 - RNA, 19 nt, Artificial Sequence
  Description of Artificial Sequence: Synthetic oligonucleotide
  Sense strand starting at position 3921 of SEQ ID NO: 1889156
gugucaugagacuaccaca

SEQ ID NO: 2581831 - RNA, 19 nt, Artificial Sequence
  Description of Artificial Sequence: Synthetic oligonucleotide
  Antisense strand to SEQ ID NO: 2581830
ugugguagucucaugacac

SEQ ID NO: 2581832 - RNA, 19 nt, Artificial Sequence
  Description of Artificial Sequence: Synthetic oligonucleotide
  Sense strand starting at position 68 of SEQ ID NO: 1889157
ucagaagaguacuuucuag

SEQ ID NO: 2581833 - RNA, 19 nt, Artificial Sequence
  Description of Artificial Sequence: Synthetic oligonucleotide
  Antisense strand to SEQ ID NO: 2581832
cuagaaaguacucuucuga

SEQ ID NO: 2581834 - RNA, 19 nt, Artificial Sequence
  Description of Artificial Sequence: Synthetic oligonucleotide
  Sense strand starting at position 223 of SEQ ID NO: 1889157
ccggcuuugccuguaacau

SEQ ID NO: 2581835 - RNA, 19 nt, Artificial Sequence
  Description of Artificial Sequence: Synthetic oligonucleotide
  Antisense strand to SEQ ID NO: 2581834
auguuacaggcaaagccgg

SEQ ID NO: 2581836 - RNA, 19 nt, Artificial Sequence
  Description of Artificial Sequence: Synthetic oligonucleotide
  Sense strand starting at position 460 of SEQ ID NO: 1889157
gugggauccaugggauugu

SEQ ID NO: 2581837 - RNA, 19 nt, Artificial Sequence
  Description of Artificial Sequence: Synthetic oligonucleotide
  Antisense strand to SEQ ID NO: 2581836
acaaucccauggaucccac

SEQ ID NO: 2581838 - RNA, 19 nt, Artificial Sequence
  Description of Artificial Sequence: Synthetic oligonucleotide
  Sense strand starting at position 552 of SEQ ID NO: 1889157
uugcuaaggaucugagaag

SEQ ID NO: 2581839 - RNA, 19 nt, Artificial Sequence
  Description of Artificial Sequence: Synthetic oligonucleotide
  Antisense strand to SEQ ID NO: 2581838
cuucucagauccuuagcaa

SEQ ID NO: 2581840 - RNA, 19 nt, Artificial Sequence
  Description of Artificial Sequence: Synthetic oligonucleotide
  Sense strand starting at position 564 of SEQ ID NO: 1889157
ugagaagaucugcaggguu

SEQ ID NO: 2581841 - RNA, 19 nt, Artificial Sequence
  Description of Artificial Sequence: Synthetic oligonucleotide
  Antisense strand to SEQ ID NO: 2581840
aacccugcagaucuucuca

SEQ ID NO: 2581842 - RNA, 19 nt, Artificial Sequence
  Description of Artificial Sequence: Synthetic oligonucleotide
  Sense strand starting at position 566 of SEQ ID NO: 1889157
agaagaucugcaggguuau

SEQ ID NO: 2581843 - RNA, 19 nt, Artificial Sequence
  Description of Artificial Sequence: Synthetic oligonucleotide
  Antisense strand to SEQ ID NO: 2581842
auaacccugcagaucuucu

SEQ ID NO: 2581844 - RNA, 19 nt, Artificial Sequence
  Description of Artificial Sequence: Synthetic oligonucleotide
  Sense strand starting at position 567 of SEQ ID NO: 1889157
gaagaucugcaggguuauu

SEQ ID NO: 2581845 - RNA, 19 nt, Artificial Sequence
  Description of Artificial Sequence: Synthetic oligonucleotide
  Antisense strand to SEQ ID NO: 2581844
aauaacccugcagaucuuc

SEQ ID NO: 2581846 - RNA, 19 nt, Artificial Sequence
  Description of Artificial Sequence: Synthetic oligonucleotide
  Sense strand starting at position 603 of SEQ ID NO: 1889157
guaggugugagucauuaug

SEQ ID NO: 2581847 - RNA, 19 nt, Artificial Sequence
  Description of Artificial Sequence: Synthetic oligonucleotide
  Antisense strand to SEQ ID NO: 2581846
cauaaugacucacaccuac

SEQ ID NO: 2581848 - RNA, 19 nt, Artificial Sequence
  Description of Artificial Sequence: Synthetic oligonucleotide
  Sense strand starting at position 605 of SEQ ID NO: 1889157
aggugugagucauuaugaa

SEQ ID NO: 2581849 - RNA, 19 nt, Artificial Sequence
  Description of Artificial Sequence: Synthetic oligonucleotide
  Antisense strand to SEQ ID NO: 2581848
uucauaaugacucacaccu

SEQ ID NO: 2581850 - RNA, 19 nt, Artificial Sequence
  Description of Artificial Sequence: Synthetic oligonucleotide
  Sense strand starting at position 646 of SEQ ID NO: 1889157
ggagcagcccgucuauguu

SEQ ID NO: 2581851 - RNA, 19 nt, Artificial Sequence
  Description of Artificial Sequence: Synthetic oligonucleotide
  Antisense strand to SEQ ID NO: 2581850
aacauagacgggcugcucc

SEQ ID NO: 2581852 - RNA, 19 nt, Artificial Sequence
  Description of Artificial Sequence: Synthetic oligonucleotide
  Sense strand starting at position 670 of SEQ ID NO: 1889157
ggguuauucucucccagau

SEQ ID NO: 2581853 - RNA, 19 nt, Artificial Sequence
  Description of Artificial Sequence: Synthetic oligonucleotide
  Antisense strand to SEQ ID NO: 2581852
aucugggagagaauaaccc

SEQ ID NO: 2581854 - RNA, 19 nt, Artificial Sequence
  Description of Artificial Sequence: Synthetic oligonucleotide
  Sense strand starting at position 737 of SEQ ID NO: 1889157
uuucuaugggaauguucca

SEQ ID NO: 2581855 - RNA, 19 nt, Artificial Sequence
  Description of Artificial Sequence: Synthetic oligonucleotide
  Antisense strand to SEQ ID NO: 2581854
uggaacauucccauagaaa

SEQ ID NO: 2581856 - RNA, 19 nt, Artificial Sequence
  Description of Artificial Sequence: Synthetic oligonucleotide
  Sense strand starting at position 973 of SEQ ID NO: 1889157
augaaucugcagugaauua

SEQ ID NO: 2581857 - RNA, 19 nt, Artificial Sequence
  Description of Artificial Sequence: Synthetic oligonucleotide
  Antisense strand to SEQ ID NO: 2581856
uaauucacugcagauucau

SEQ ID NO: 2581858 - RNA, 19 nt, Artificial Sequence
  Description of Artificial Sequence: Synthetic oligonucleotide
  Sense strand starting at position 983 of SEQ ID NO: 1889157
agugaauuaggauguaagu

SEQ ID NO: 2581859 - RNA, 19 nt, Artificial Sequence
  Description of Artificial Sequence: Synthetic oligonucleotide
  Antisense strand to SEQ ID NO: 2581858
acuuacauccuaauucacu

SEQ ID NO: 2581860 - RNA, 19 nt, Artificial Sequence
  Description of Artificial Sequence: Synthetic oligonucleotide
  Sense strand starting at position 1479 of SEQ ID NO: 1889157
gugggaguacuccaaugua

SEQ ID NO: 2581861 - RNA, 19 nt, Artificial Sequence
  Description of Artificial Sequence: Synthetic oligonucleotide
  Antisense strand to SEQ ID NO: 2581860
uacauuggaguacucccac

SEQ ID NO: 2581862 - RNA, 19 nt, Artificial Sequence
  Description of Artificial Sequence: Synthetic oligonucleotide
  Sense strand starting at position 1482 of SEQ ID NO: 1889157
ggaguacuccaauguacaa

SEQ ID NO: 2581863 - RNA, 19 nt, Artificial Sequence
  Description of Artificial Sequence: Synthetic oligonucleotide
  Antisense strand to SEQ ID NO: 2581862
uuguacauuggaguacucc

SEQ ID NO: 2581864 - RNA, 19 nt, Artificial Sequence
  Description of Artificial Sequence: Synthetic oligonucleotide
  Sense strand starting at position 1562 of SEQ ID NO: 1889157
cuugaagccaaaugugagu

SEQ ID NO: 2581865 - RNA, 19 nt, Artificial Sequence
  Description of Artificial Sequence: Synthetic oligonucleotide
  Antisense strand to SEQ ID NO: 2581864
acucacauuuggcuucaag

SEQ ID NO: 2581866 - RNA, 19 nt, Artificial Sequence
  Description of Artificial Sequence: Synthetic oligonucleotide
  Sense strand starting at position 1587 of SEQ ID NO: 1889157
gauugaugcuuugugggau

SEQ ID NO: 2581867 - RNA, 19 nt, Artificial Sequence
  Description of Artificial Sequence: Synthetic oligonucleotide
  Antisense strand to SEQ ID NO: 2581866
aucccacaaagcaucaauc

SEQ ID NO: 2581868 - RNA, 19 nt, Artificial Sequence
  Description of Artificial Sequence: Synthetic oligonucleotide
  Sense strand starting at position 1641 of SEQ ID NO: 1889157
ccaugauucucauuguccu

SEQ ID NO: 2581869 - RNA, 19 nt, Artificial Sequence
  Description of Artificial Sequence: Synthetic oligonucleotide
  Antisense strand to SEQ ID NO: 2581868
aggacaaugagaaucaugg

SEQ ID NO: 2581870 - RNA, 19 nt, Artificial Sequence
  Description of Artificial Sequence: Synthetic oligonucleotide
  Sense strand starting at position 1769 of SEQ ID NO: 1889157
augcuuuaaugacuggaaa

SEQ ID NO: 2581871 - RNA, 19 nt, Artificial Sequence
  Description of Artificial Sequence: Synthetic oligonucleotide
  Antisense strand to SEQ ID NO: 2581870
uuuccagucauuaaagcau

SEQ ID NO: 2581872 - RNA, 19 nt, Artificial Sequence
  Description of Artificial Sequence: Synthetic oligonucleotide
  Sense strand starting at position 1770 of SEQ ID NO: 1889157
ugcuuuaaugacuggaaag

SEQ ID NO: 2581873 - RNA, 19 nt, Artificial Sequence
  Description of Artificial Sequence: Synthetic oligonucleotide
  Antisense strand to SEQ ID NO: 2581872
cuuuccagucauuaaagca

SEQ ID NO: 2581874 - RNA, 19 nt, Artificial Sequence
  Description of Artificial Sequence: Synthetic oligonucleotide
  Sense strand starting at position 1771 of SEQ ID NO: 1889157
gcuuuaaugacuggaaagu

SEQ ID NO: 2581875 - RNA, 19 nt, Artificial Sequence
  Description of Artificial Sequence: Synthetic oligonucleotide
  Antisense strand to SEQ ID NO: 2581874
acuuuccagucauuaaagc

SEQ ID NO: 2581876 - RNA, 19 nt, Artificial Sequence
  Description of Artificial Sequence: Synthetic oligonucleotide
  Sense strand starting at position 1833 of SEQ ID NO: 1889157
ggaaacuuguucucucuua

SEQ ID NO: 2581877 - RNA, 19 nt, Artificial Sequence
  Description of Artificial Sequence: Synthetic oligonucleotide
  Antisense strand to SEQ ID NO: 2581876
uaagagagaacaaguuucc

SEQ ID NO: 2581878 - RNA, 19 nt, Artificial Sequence
  Description of Artificial Sequence: Synthetic oligonucleotide
  Sense strand starting at position 1855 of SEQ ID NO: 1889157
auugaagagcugcaugauu

SEQ ID NO: 2581879 - RNA, 19 nt, Artificial Sequence
  Description of Artificial Sequence: Synthetic oligonucleotide
  Antisense strand to SEQ ID NO: 2581878
aaucaugcagcucuucaau

SEQ ID NO: 2581880 - RNA, 19 nt, Artificial Sequence
  Description of Artificial Sequence: Synthetic oligonucleotide
  Sense strand starting at position 1998 of SEQ ID NO: 1889157
ugucucuugccacagauua

SEQ ID NO: 2581881 - RNA, 19 nt, Artificial Sequence
  Description of Artificial Sequence: Synthetic oligonucleotide
  Antisense strand to SEQ ID NO: 2581880
uaaucuguggcaagagaca

SEQ ID NO: 2581882 - RNA, 19 nt, Artificial Sequence
  Description of Artificial Sequence: Synthetic oligonucleotide
  Sense strand starting at position 2306 of SEQ ID NO: 1889157
cugucuaaaccuuaucugu

SEQ ID NO: 2581883 - RNA, 19 nt, Artificial Sequence
  Description of Artificial Sequence: Synthetic oligonucleotide
  Antisense strand to SEQ ID NO: 2581882
acagauaagguuuagacag

SEQ ID NO: 2581884 - RNA, 19 nt, Artificial Sequence
  Description of Artificial Sequence: Synthetic oligonucleotide
  Sense strand starting at position 2308 of SEQ ID NO: 1889157
gucuaaaccuuaucuguaa

SEQ ID NO: 2581885 - RNA, 19 nt, Artificial Sequence
  Description of Artificial Sequence: Synthetic oligonucleotide
  Antisense strand to SEQ ID NO: 2581884
uuacagauaagguuuagac

SEQ ID NO: 2581886 - RNA, 19 nt, Artificial Sequence
  Description of Artificial Sequence: Synthetic oligonucleotide
  Sense strand starting at position 2323 of SEQ ID NO: 1889157
guaacuguuagaggaugau

SEQ ID NO: 2581887 - RNA, 19 nt, Artificial Sequence
  Description of Artificial Sequence: Synthetic oligonucleotide
  Antisense strand to SEQ ID NO: 2581886
aucauccucuaacaguuac

SEQ ID NO: 2581888 - RNA, 19 nt, Artificial Sequence
  Description of Artificial Sequence: Synthetic oligonucleotide
  Sense strand starting at position 2349 of SEQ ID NO: 1889157
gugagaacaugauucugca

SEQ ID NO: 2581889 - RNA, 19 nt, Artificial Sequence
  Description of Artificial Sequence: Synthetic oligonucleotide
  Antisense strand to SEQ ID NO: 2581888
ugcagaaucauguucucac

SEQ ID NO: 2581890 - RNA, 19 nt, Artificial Sequence
  Description of Artificial Sequence: Synthetic oligonucleotide
  Sense strand starting at position 2357 of SEQ ID NO: 1889157
augauucugcauugaacuu

SEQ ID NO: 2581891 - RNA, 19 nt, Artificial Sequence
  Description of Artificial Sequence: Synthetic oligonucleotide
  Antisense strand to SEQ ID NO: 2581890
aaguucaaugcagaaucau

SEQ ID NO: 2581892 - RNA, 19 nt, Artificial Sequence
  Description of Artificial Sequence: Synthetic oligonucleotide
  Sense strand starting at position 2401 of SEQ ID NO: 1889157
ccagaaagccucugugaug

SEQ ID NO: 2581893 - RNA, 19 nt, Artificial Sequence
  Description of Artificial Sequence: Synthetic oligonucleotide
  Antisense strand to SEQ ID NO: 2581892
caucacagaggcuuucugg

SEQ ID NO: 2581894 - RNA, 19 nt, Artificial Sequence
  Description of Artificial Sequence: Synthetic oligonucleotide
  Sense strand starting at position 2412 of SEQ ID NO: 1889157
cugugaugucaaggaugaa

SEQ ID NO: 2581895 - RNA, 19 nt, Artificial Sequence
  Description of Artificial Sequence: Synthetic oligonucleotide
  Antisense strand to SEQ ID NO: 2581894
uucauccuugacaucacag

SEQ ID NO: 2581896 - RNA, 19 nt, Artificial Sequence
  Description of Artificial Sequence: Synthetic oligonucleotide
  Sense strand starting at position 2532 of SEQ ID NO: 1889157
auuccaauacgguacuaua

SEQ ID NO: 2581897 - RNA, 19 nt, Artificial Sequence
  Description of Artificial Sequence: Synthetic oligonucleotide
  Antisense strand to SEQ ID NO: 2581896
uauaguaccguauuggaau

SEQ ID NO: 2581898 - RNA, 19 nt, Artificial Sequence
  Description of Artificial Sequence: Synthetic oligonucleotide
  Sense strand starting at position 2661 of SEQ ID NO: 1889157
gagacccgaccauguaaau

SEQ ID NO: 2581899 - RNA, 19 nt, Artificial Sequence
  Description of Artificial Sequence: Synthetic oligonucleotide
  Antisense strand to SEQ ID NO: 2581898
auuuacauggucgggucuc

SEQ ID NO: 2581900 - RNA, 19 nt, Artificial Sequence
  Description of Artificial Sequence: Synthetic oligonucleotide
  Sense strand starting at position 2670 of SEQ ID NO: 1889157
ccauguaaauggucugaag

SEQ ID NO: 2581901 - RNA, 19 nt, Artificial Sequence
  Description of Artificial Sequence: Synthetic oligonucleotide
  Antisense strand to SEQ ID NO: 2581900
cuucagaccauuuacaugg

SEQ ID NO: 2581902 - RNA, 19 nt, Artificial Sequence
  Description of Artificial Sequence: Synthetic oligonucleotide
  Sense strand starting at position 2692 of SEQ ID NO: 1889157
cccugaggucgagaaguuu

SEQ ID NO: 2581903 - RNA, 19 nt, Artificial Sequence
  Description of Artificial Sequence: Synthetic oligonucleotide
  Antisense strand to SEQ ID NO: 2581902
aaacuucucgaccucaggg

SEQ ID NO: 2581904 - RNA, 19 nt, Artificial Sequence
  Description of Artificial Sequence: Synthetic oligonucleotide
  Sense strand starting at position 2704 of SEQ ID NO: 1889157
gaaguuuagugucccauag

SEQ ID NO: 2581905 - RNA, 19 nt, Artificial Sequence
  Description of Artificial Sequence: Synthetic oligonucleotide
  Antisense strand to SEQ ID NO: 2581904
cuaugggacacuaaacuuc

SEQ ID NO: 2581906 - RNA, 19 nt, Artificial Sequence
  Description of Artificial Sequence: Synthetic oligonucleotide
  Sense strand starting at position 2960 of SEQ ID NO: 1889157
guugcauuggcugcgaacu

SEQ ID NO: 2581907 - RNA, 19 nt, Artificial Sequence
  Description of Artificial Sequence: Synthetic oligonucleotide
  Antisense strand to SEQ ID NO: 2581906
aguucgcagccaaugcaac

SEQ ID NO: 2581908 - RNA, 19 nt, Artificial Sequence
  Description of Artificial Sequence: Synthetic oligonucleotide
  Sense strand starting at position 2982 of SEQ ID NO: 1889157
gccuaucuucuuugggaua

SEQ ID NO: 2581909 - RNA, 19 nt, Artificial Sequence
  Description of Artificial Sequence: Synthetic oligonucleotide
  Antisense strand to SEQ ID NO: 2581908
uaucccaaagaagauaggc

SEQ ID NO: 2581910 - RNA, 19 nt, Artificial Sequence
  Description of Artificial Sequence: Synthetic oligonucleotide
  Sense strand starting at position 3301 of SEQ ID NO: 1889157
gucuguguggcaucgugua

SEQ ID NO: 2581911 - RNA, 19 nt, Artificial Sequence
  Description of Artificial Sequence: Synthetic oligonucleotide
  Antisense strand to SEQ ID NO: 2581910
uacacgaugccacacagac

SEQ ID NO: 2581912 - RNA, 19 nt, Artificial Sequence
  Description of Artificial Sequence: Synthetic oligonucleotide
  Sense strand starting at position 8 of SEQ ID NO: 1889158
aggguaaguuucuugcaca

SEQ ID NO: 2581913 - RNA, 19 nt, Artificial Sequence
  Description of Artificial Sequence: Synthetic oligonucleotide
  Antisense strand to SEQ ID NO: 2581912
ugugcaagaaacuuacccu

SEQ ID NO: 2581914 - RNA, 19 nt, Artificial Sequence
  Description of Artificial Sequence: Synthetic oligonucleotide
  Sense strand starting at position 141 of SEQ ID NO: 1889158
guaaguggagagugcuuaa

SEQ ID NO: 2581915 - RNA, 19 nt, Artificial Sequence
  Description of Artificial Sequence: Synthetic oligonucleotide
  Antisense strand to SEQ ID NO: 2581914
uuaagcacucuccacuuac

SEQ ID NO: 2581916 - RNA, 19 nt, Artificial Sequence
  Description of Artificial Sequence: Synthetic oligonucleotide
  Sense strand starting at position 144 of SEQ ID NO: 1889158
aguggagagugcuuaaaug

SEQ ID NO: 2581917 - RNA, 19 nt, Artificial Sequence
  Description of Artificial Sequence: Synthetic oligonucleotide
  Antisense strand to SEQ ID NO: 2581916
cauuuaagcacucuccacu

SEQ ID NO: 2581918 - RNA, 19 nt, Artificial Sequence
  Description of Artificial Sequence: Synthetic oligonucleotide
  Sense strand starting at position 217 of SEQ ID NO: 1889158
cugcuugagccacaucaua

SEQ ID NO: 2581919 - RNA, 19 nt, Artificial Sequence
  Description of Artificial Sequence: Synthetic oligonucleotide
  Antisense strand to SEQ ID NO: 2581918
uaugauguggcucaagcag

SEQ ID NO: 2581920 - RNA, 19 nt, Artificial Sequence
  Description of Artificial Sequence: Synthetic oligonucleotide
  Sense strand starting at position 616 of SEQ ID NO: 1889158
cccacauucccuuaguuga

SEQ ID NO: 2581921 - RNA, 19 nt, Artificial Sequence
  Description of Artificial Sequence: Synthetic oligonucleotide
  Antisense strand to SEQ ID NO: 2581920
ucaacuaagggaauguggg

SEQ ID NO: 2581922 - RNA, 19 nt, Artificial Sequence
  Description of Artificial Sequence: Synthetic oligonucleotide
  Sense strand starting at position 619 of SEQ ID NO: 1889158
acauucccuuaguugaaga

SEQ ID NO: 2581923 - RNA, 19 nt, Artificial Sequence
  Description of Artificial Sequence: Synthetic oligonucleotide
  Antisense strand to SEQ ID NO: 2581922
ucuucaacuaagggaaugu

SEQ ID NO: 2581924 - RNA, 19 nt, Artificial Sequence
  Description of Artificial Sequence: Synthetic oligonucleotide
  Sense strand starting at position 657 of SEQ ID NO: 1889158
caguguucaggugagugua

SEQ ID NO: 2581925 - RNA, 19 nt, Artificial Sequence
  Description of Artificial Sequence: Synthetic oligonucleotide
  Antisense strand to SEQ ID NO: 2581924
uacacucaccugaacacug

SEQ ID NO: 2581926 - RNA, 19 nt, Artificial Sequence
  Description of Artificial Sequence: Synthetic oligonucleotide
  Sense strand starting at position 660 of SEQ ID NO: 1889158
uguucaggugaguguacaa

SEQ ID NO: 2581927 - RNA, 19 nt, Artificial Sequence
  Description of Artificial Sequence: Synthetic oligonucleotide
  Antisense strand to SEQ ID NO: 2581926
uuguacacucaccugaaca

SEQ ID NO: 2581928 - RNA, 19 nt, Artificial Sequence
  Description of Artificial Sequence: Synthetic oligonucleotide
  Sense strand starting at position 1034 of SEQ ID NO: 1889158
ugacuucugcagggugaga

SEQ ID NO: 2581929 - RNA, 19 nt, Artificial Sequence
  Description of Artificial Sequence: Synthetic oligonucleotide
  Antisense strand to SEQ ID NO: 2581928
ucucacccugcagaaguca

SEQ ID NO: 2581930 - RNA, 19 nt, Artificial Sequence
  Description of Artificial Sequence: Synthetic oligonucleotide
  Sense strand starting at position 1246 of SEQ ID NO: 1889158
cugggucauugucucauuu

SEQ ID NO: 2581931 - RNA, 19 nt, Artificial Sequence
  Description of Artificial Sequence: Synthetic oligonucleotide
  Antisense strand to SEQ ID NO: 2581930
aaaugagacaaugacccag

SEQ ID NO: 2581932 - RNA, 19 nt, Artificial Sequence
  Description of Artificial Sequence: Synthetic oligonucleotide
  Sense strand starting at position 1269 of SEQ ID NO: 1889158
ggcugaaguuccuuccacu

SEQ ID NO: 2581933 - RNA, 19 nt, Artificial Sequence
  Description of Artificial Sequence: Synthetic oligonucleotide
  Antisense strand to SEQ ID NO: 2581932
aguggaaggaacuucagcc

SEQ ID NO: 2581934 - RNA, 19 nt, Artificial Sequence
  Description of Artificial Sequence: Synthetic oligonucleotide
  Sense strand starting at position 1457 of SEQ ID NO: 1889158
auaaauggccuuugacaca

SEQ ID NO: 2581935 - RNA, 19 nt, Artificial Sequence
  Description of Artificial Sequence: Synthetic oligonucleotide
  Antisense strand to SEQ ID NO: 2581934
ugugucaaaggccauuuau

SEQ ID NO: 2581936 - RNA, 19 nt, Artificial Sequence
  Description of Artificial Sequence: Synthetic oligonucleotide
  Sense strand starting at position 1550 of SEQ ID NO: 1889158
uugucuuagguccagacuu

SEQ ID NO: 2581937 - RNA, 19 nt, Artificial Sequence
  Description of Artificial Sequence: Synthetic oligonucleotide
  Antisense strand to SEQ ID NO: 2581936
aagucuggaccuaagacaa

SEQ ID NO: 2581938 - RNA, 19 nt, Artificial Sequence
  Description of Artificial Sequence: Synthetic oligonucleotide
  Sense strand starting at position 2048 of SEQ ID NO: 1889158
ucacaaugaguguaaccau

SEQ ID NO: 2581939 - RNA, 19 nt, Artificial Sequence
  Description of Artificial Sequence: Synthetic oligonucleotide
  Antisense strand to SEQ ID NO: 2581938
augguuacacucauuguga

SEQ ID NO: 2581940 - RNA, 19 nt, Artificial Sequence
  Description of Artificial Sequence: Synthetic oligonucleotide
  Sense strand starting at position 2055 of SEQ ID NO: 1889158
gaguguaaccauugccuag

SEQ ID NO: 2581941 - RNA, 19 nt, Artificial Sequence
  Description of Artificial Sequence: Synthetic oligonucleotide
  Antisense strand to SEQ ID NO: 2581940
cuaggcaaugguuacacuc

SEQ ID NO: 2581942 - RNA, 19 nt, Artificial Sequence
  Description of Artificial Sequence: Synthetic oligonucleotide
  Sense strand starting at position 2086 of SEQ ID NO: 1889158
guggcuugguggagaagaa

SEQ ID NO: 2581943 - RNA, 19 nt, Artificial Sequence
  Description of Artificial Sequence: Synthetic oligonucleotide
  Antisense strand to SEQ ID NO: 2581942
uucuucuccaccaagccac

SEQ ID NO: 2581944 - RNA, 19 nt, Artificial Sequence
  Description of Artificial Sequence: Synthetic oligonucleotide
  Sense strand starting at position 2101 of SEQ ID NO: 1889158
agaagaccuccguggaguu

SEQ ID NO: 2581945 - RNA, 19 nt, Artificial Sequence
  Description of Artificial Sequence: Synthetic oligonucleotide
  Antisense strand to SEQ ID NO: 2581944
aacuccacggaggucuucu

SEQ ID NO: 2581946 - RNA, 19 nt, Artificial Sequence
  Description of Artificial Sequence: Synthetic oligonucleotide
  Sense strand starting at position 2148 of SEQ ID NO: 1889158
cacugugggauccauggua

SEQ ID NO: 2581947 - RNA, 19 nt, Artificial Sequence
  Description of Artificial Sequence: Synthetic oligonucleotide
  Antisense strand to SEQ ID NO: 2581946
uaccauggaucccacagug

SEQ ID NO: 2581948 - RNA, 19 nt, Artificial Sequence
  Description of Artificial Sequence: Synthetic oligonucleotide
  Sense strand starting at position 2163 of SEQ ID NO: 1889158
gguauuguuccaugauccu

SEQ ID NO: 2581949 - RNA, 19 nt, Artificial Sequence
  Description of Artificial Sequence: Synthetic oligonucleotide
  Antisense strand to SEQ ID NO: 2581948
aggaucauggaacaauacc

SEQ ID NO: 2581950 - RNA, 19 nt, Artificial Sequence
  Description of Artificial Sequence: Synthetic oligonucleotide
  Sense strand starting at position 2328 of SEQ ID NO: 1889158
cacugugauuucuagguag

SEQ ID NO: 2581951 - RNA, 19 nt, Artificial Sequence
  Description of Artificial Sequence: Synthetic oligonucleotide
  Antisense strand to SEQ ID NO: 2581950
cuaccuagaaaucacagug

SEQ ID NO: 2581952 - RNA, 19 nt, Artificial Sequence
  Description of Artificial Sequence: Synthetic oligonucleotide
  Sense strand starting at position 2590 of SEQ ID NO: 1889158
acgugaaaggguuguaaua

SEQ ID NO: 2581953 - RNA, 19 nt, Artificial Sequence
  Description of Artificial Sequence: Synthetic oligonucleotide
  Antisense strand to SEQ ID NO: 2581952
uauuacaacccuuucacgu

SEQ ID NO: 2581954 - RNA, 19 nt, Artificial Sequence
  Description of Artificial Sequence: Synthetic oligonucleotide
  Sense strand starting at position 2600 of SEQ ID NO: 1889158
guuguaauagauugagauc

SEQ ID NO: 2581955 - RNA, 19 nt, Artificial Sequence
  Description of Artificial Sequence: Synthetic oligonucleotide
  Antisense strand to SEQ ID NO: 2581954
gaucucaaucuauuacaac

SEQ ID NO: 2581956 - RNA, 19 nt, Artificial Sequence
  Description of Artificial Sequence: Synthetic oligonucleotide
  Sense strand starting at position 2635 of SEQ ID NO: 1889158
gguuagagugguggguuaa

SEQ ID NO: 2581957 - RNA, 19 nt, Artificial Sequence
  Description of Artificial Sequence: Synthetic oligonucleotide
  Antisense strand to SEQ ID NO: 2581956
uuaacccaccacucuaacc

SEQ ID NO: 2581958 - RNA, 19 nt, Artificial Sequence
  Description of Artificial Sequence: Synthetic oligonucleotide
  Sense strand starting at position 2636 of SEQ ID NO: 1889158
guuagagugguggguuaaa

SEQ ID NO: 2581959 - RNA, 19 nt, Artificial Sequence
  Description of Artificial Sequence: Synthetic oligonucleotide
  Antisense strand to SEQ ID NO: 2581958
uuuaacccaccacucuaac

SEQ ID NO: 2581960 - RNA, 19 nt, Artificial Sequence
  Description of Artificial Sequence: Synthetic oligonucleotide
  Sense strand starting at position 2808 of SEQ ID NO: 1889158
gcacucacuagugagaguu

SEQ ID NO: 2581961 - RNA, 19 nt, Artificial Sequence
  Description of Artificial Sequence: Synthetic oligonucleotide
  Antisense strand to SEQ ID NO: 2581960
aacucucacuagugagugc

SEQ ID NO: 2581962 - RNA, 19 nt, Artificial Sequence
  Description of Artificial Sequence: Synthetic oligonucleotide
  Sense strand starting at position 2816 of SEQ ID NO: 1889158
uagugagaguucucuuucu

SEQ ID NO: 2581963 - RNA, 19 nt, Artificial Sequence
  Description of Artificial Sequence: Synthetic oligonucleotide
  Antisense strand to SEQ ID NO: 2581962
agaaagagaacucucacua

SEQ ID NO: 2581964 - RNA, 19 nt, Artificial Sequence
  Description of Artificial Sequence: Synthetic oligonucleotide
  Sense strand starting at position 2821 of SEQ ID NO: 1889158
agaguucucuuucucaucu

SEQ ID NO: 2581965 - RNA, 19 nt, Artificial Sequence
  Description of Artificial Sequence: Synthetic oligonucleotide
  Antisense strand to SEQ ID NO: 2581964
agaugagaaagagaacucu

SEQ ID NO: 2581966 - RNA, 19 nt, Artificial Sequence
  Description of Artificial Sequence: Synthetic oligonucleotide
  Sense strand starting at position 3066 of SEQ ID NO: 1889158
gggaucaaguaguuauaau

SEQ ID NO: 2581967 - RNA, 19 nt, Artificial Sequence
  Description of Artificial Sequence: Synthetic oligonucleotide
  Antisense strand to SEQ ID NO: 2581966
auuauaacuacuugauccc

SEQ ID NO: 2581968 - RNA, 19 nt, Artificial Sequence
  Description of Artificial Sequence: Synthetic oligonucleotide
  Sense strand starting at position 3304 of SEQ ID NO: 1889158
ugaguccuacaaugaguuu

SEQ ID NO: 2581969 - RNA, 19 nt, Artificial Sequence
  Description of Artificial Sequence: Synthetic oligonucleotide
  Antisense strand to SEQ ID NO: 2581968
aaacucauuguaggacuca

SEQ ID NO: 2581970 - RNA, 19 nt, Artificial Sequence
  Description of Artificial Sequence: Synthetic oligonucleotide
  Sense strand starting at position 3369 of SEQ ID NO: 1889158
uggaguagggcuugucauc

SEQ ID NO: 2581971 - RNA, 19 nt, Artificial Sequence
  Description of Artificial Sequence: Synthetic oligonucleotide
  Antisense strand to SEQ ID NO: 2581970
gaugacaagcccuacucca

SEQ ID NO: 2581972 - RNA, 19 nt, Artificial Sequence
  Description of Artificial Sequence: Synthetic oligonucleotide
  Sense strand starting at position 3405 of SEQ ID NO: 1889158
ggagguguuaucugggcuu

SEQ ID NO: 2581973 - RNA, 19 nt, Artificial Sequence
  Description of Artificial Sequence: Synthetic oligonucleotide
  Antisense strand to SEQ ID NO: 2581972
aagcccagauaacaccucc

SEQ ID NO: 2581974 - RNA, 19 nt, Artificial Sequence
  Description of Artificial Sequence: Synthetic oligonucleotide
  Sense strand starting at position 3465 of SEQ ID NO: 1889158
cuaugauggauccacgcua

SEQ ID NO: 2581975 - RNA, 19 nt, Artificial Sequence
  Description of Artificial Sequence: Synthetic oligonucleotide
  Antisense strand to SEQ ID NO: 2581974
uagcguggauccaucauag

SEQ ID NO: 2581976 - RNA, 19 nt, Artificial Sequence
  Description of Artificial Sequence: Synthetic oligonucleotide
  Sense strand starting at position 3470 of SEQ ID NO: 1889158
auggauccacgcuagaauu

SEQ ID NO: 2581977 - RNA, 19 nt, Artificial Sequence
  Description of Artificial Sequence: Synthetic oligonucleotide
  Antisense strand to SEQ ID NO: 2581976
aauucuagcguggauccau

SEQ ID NO: 2581978 - RNA, 19 nt, Artificial Sequence
  Description of Artificial Sequence: Synthetic oligonucleotide
  Sense strand starting at position 3494 of SEQ ID NO: 1889158
uacauuuguggcuguggga

SEQ ID NO: 2581979 - RNA, 19 nt, Artificial Sequence
  Description of Artificial Sequence: Synthetic oligonucleotide
  Antisense strand to SEQ ID NO: 2581978
ucccacagccacaaaugua

SEQ ID NO: 2581980 - RNA, 19 nt, Artificial Sequence
  Description of Artificial Sequence: Synthetic oligonucleotide
  Sense strand starting at position 3587 of SEQ ID NO: 1889158
cccgaucaucugggaagaa

SEQ ID NO: 2581981 - RNA, 19 nt, Artificial Sequence
  Description of Artificial Sequence: Synthetic oligonucleotide
  Antisense strand to SEQ ID NO: 2581980
uucuucccagaugaucggg

SEQ ID NO: 2581982 - RNA, 19 nt, Artificial Sequence
  Description of Artificial Sequence: Synthetic oligonucleotide
  Sense strand starting at position 3619 of SEQ ID NO: 1889158
ggcugaaauuguuucugua

SEQ ID NO: 2581983 - RNA, 19 nt, Artificial Sequence
  Description of Artificial Sequence: Synthetic oligonucleotide
  Antisense strand to SEQ ID NO: 2581982
uacagaaacaauuucagcc

SEQ ID NO: 2581984 - RNA, 19 nt, Artificial Sequence
  Description of Artificial Sequence: Synthetic oligonucleotide
  Sense strand starting at position 3621 of SEQ ID NO: 1889158
cugaaauuguuucuguaau

SEQ ID NO: 2581985 - RNA, 19 nt, Artificial Sequence
  Description of Artificial Sequence: Synthetic oligonucleotide
  Antisense strand to SEQ ID NO: 2581984
auuacagaaacaauuucag

SEQ ID NO: 2581986 - RNA, 19 nt, Artificial Sequence
  Description of Artificial Sequence: Synthetic oligonucleotide
  Sense strand starting at position 3641 of SEQ ID NO: 1889158
uucccuagagccuguaauu

SEQ ID NO: 2581987 - RNA, 19 nt, Artificial Sequence
  Description of Artificial Sequence: Synthetic oligonucleotide
  Antisense strand to SEQ ID NO: 2581986
aauuacaggcucuagggaa

SEQ ID NO: 2581988 - RNA, 19 nt, Artificial Sequence
  Description of Artificial Sequence: Synthetic oligonucleotide
  Sense strand starting at position 3807 of SEQ ID NO: 1889158
gagcuugugccggcuuuaa

SEQ ID NO: 2581989 - RNA, 19 nt, Artificial Sequence
  Description of Artificial Sequence: Synthetic oligonucleotide
  Antisense strand to SEQ ID NO: 2581988
uuaaagccggcacaagcuc

SEQ ID NO: 2581990 - RNA, 19 nt, Artificial Sequence
  Description of Artificial Sequence: Synthetic oligonucleotide
  Sense strand starting at position 3809 of SEQ ID NO: 1889158
gcuugugccggcuuuaauc

SEQ ID NO: 2581991 - RNA, 19 nt, Artificial Sequence
  Description of Artificial Sequence: Synthetic oligonucleotide
  Antisense strand to SEQ ID NO: 2581990
gauuaaagccggcacaagc

SEQ ID NO: 2581992 - RNA, 19 nt, Artificial Sequence
  Description of Artificial Sequence: Synthetic oligonucleotide
  Sense strand starting at position 7 of SEQ ID NO: 1889159
aggguaaguuucuugcaca

SEQ ID NO: 2581993 - RNA, 19 nt, Artificial Sequence
  Description of Artificial Sequence: Synthetic oligonucleotide
  Antisense strand to SEQ ID NO: 2581992
ugugcaagaaacuuacccu

SEQ ID NO: 2581994 - RNA, 19 nt, Artificial Sequence
  Description of Artificial Sequence: Synthetic oligonucleotide
  Sense strand starting at position 140 of SEQ ID NO: 1889159
guaaguggagagugcuuaa

SEQ ID NO: 2581995 - RNA, 19 nt, Artificial Sequence
  Description of Artificial Sequence: Synthetic oligonucleotide
  Antisense strand to SEQ ID NO: 2581994
uuaagcacucuccacuuac

SEQ ID NO: 2581996 - RNA, 19 nt, Artificial Sequence
  Description of Artificial Sequence: Synthetic oligonucleotide
  Sense strand starting at position 143 of SEQ ID NO: 1889159
aguggagagugcuuaaaug

SEQ ID NO: 2581997 - RNA, 19 nt, Artificial Sequence
  Description of Artificial Sequence: Synthetic oligonucleotide
  Antisense strand to SEQ ID NO: 2581996
cauuuaagcacucuccacu

SEQ ID NO: 2581998 - RNA, 19 nt, Artificial Sequence
  Description of Artificial Sequence: Synthetic oligonucleotide
  Sense strand starting at position 216 of SEQ ID NO: 1889159
cugcuugagccacaucaua

SEQ ID NO: 2581999 - RNA, 19 nt, Artificial Sequence
  Description of Artificial Sequence: Synthetic oligonucleotide
  Antisense strand to SEQ ID NO: 2581998
uaugauguggcucaagcag

SEQ ID NO: 2582000 - RNA, 19 nt, Artificial Sequence
  Description of Artificial Sequence: Synthetic oligonucleotide
  Sense strand starting at position 230 of SEQ ID NO: 1889159
ucauaagucucagugaauu

SEQ ID NO: 2582001 - RNA, 19 nt, Artificial Sequence
  Description of Artificial Sequence: Synthetic oligonucleotide
  Antisense strand to SEQ ID NO: 2582000
aauucacugagacuuauga

SEQ ID NO: 2582002 - RNA, 19 nt, Artificial Sequence
  Description of Artificial Sequence: Synthetic oligonucleotide
  Sense strand starting at position 615 of SEQ ID NO: 1889159
cccacauucccuuaguuga

SEQ ID NO: 2582003 - RNA, 19 nt, Artificial Sequence
  Description of Artificial Sequence: Synthetic oligonucleotide
  Antisense strand to SEQ ID NO: 2582002
ucaacuaagggaauguggg

SEQ ID NO: 2582004 - RNA, 19 nt, Artificial Sequence
  Description of Artificial Sequence: Synthetic oligonucleotide
  Sense strand starting at position 618 of SEQ ID NO: 1889159
acauucccuuaguugaaga

SEQ ID NO: 2582005 - RNA, 19 nt, Artificial Sequence
  Description of Artificial Sequence: Synthetic oligonucleotide
  Antisense strand to SEQ ID NO: 2582004
ucuucaacuaagggaaugu

SEQ ID NO: 2582006 - RNA, 19 nt, Artificial Sequence
  Description of Artificial Sequence: Synthetic oligonucleotide
  Sense strand starting at position 761 of SEQ ID NO: 1889159
gaauguggccuccacacuu

SEQ ID NO: 2582007 - RNA, 19 nt, Artificial Sequence
  Description of Artificial Sequence: Synthetic oligonucleotide
  Antisense strand to SEQ ID NO: 2582006
aaguguggaggccacauuc

SEQ ID NO: 2582008 - RNA, 19 nt, Artificial Sequence
  Description of Artificial Sequence: Synthetic oligonucleotide
  Sense strand starting at position 890 of SEQ ID NO: 1889159
ggugauccacugugugagu

SEQ ID NO: 2582009 - RNA, 19 nt, Artificial Sequence
  Description of Artificial Sequence: Synthetic oligonucleotide
  Antisense strand to SEQ ID NO: 2582008
acucacacaguggaucacc

SEQ ID NO: 2582010 - RNA, 19 nt, Artificial Sequence
  Description of Artificial Sequence: Synthetic oligonucleotide
  Sense strand starting at position 1033 of SEQ ID NO: 1889159
ugacuucugcagggugaga

SEQ ID NO: 2582011 - RNA, 19 nt, Artificial Sequence
  Description of Artificial Sequence: Synthetic oligonucleotide
  Antisense strand to SEQ ID NO: 2582010
ucucacccugcagaaguca

SEQ ID NO: 2582012 - RNA, 19 nt, Artificial Sequence
  Description of Artificial Sequence: Synthetic oligonucleotide
  Sense strand starting at position 1245 of SEQ ID NO: 1889159
cugggucauugucucauuu

SEQ ID NO: 2582013 - RNA, 19 nt, Artificial Sequence
  Description of Artificial Sequence: Synthetic oligonucleotide
  Antisense strand to SEQ ID NO: 2582012
aaaugagacaaugacccag

SEQ ID NO: 2582014 - RNA, 19 nt, Artificial Sequence
  Description of Artificial Sequence: Synthetic oligonucleotide
  Sense strand starting at position 1268 of SEQ ID NO: 1889159
ggcugaaguuccuuccacu

SEQ ID NO: 2582015 - RNA, 19 nt, Artificial Sequence
  Description of Artificial Sequence: Synthetic oligonucleotide
  Antisense strand to SEQ ID NO: 2582014
aguggaaggaacuucagcc

SEQ ID NO: 2582016 - RNA, 19 nt, Artificial Sequence
  Description of Artificial Sequence: Synthetic oligonucleotide
  Sense strand starting at position 1549 of SEQ ID NO: 1889159
uugucuuagguccagacuu

SEQ ID NO: 2582017 - RNA, 19 nt, Artificial Sequence
  Description of Artificial Sequence: Synthetic oligonucleotide
  Antisense strand to SEQ ID NO: 2582016
aagucuggaccuaagacaa

SEQ ID NO: 2582018 - RNA, 19 nt, Artificial Sequence
  Description of Artificial Sequence: Synthetic oligonucleotide
  Sense strand starting at position 1818 of SEQ ID NO: 1889159
augacauggccauggagau

SEQ ID NO: 2582019 - RNA, 19 nt, Artificial Sequence
  Description of Artificial Sequence: Synthetic oligonucleotide
  Antisense strand to SEQ ID NO: 2582018
aucuccauggccaugucau

SEQ ID NO: 2582020 - RNA, 19 nt, Artificial Sequence
  Description of Artificial Sequence: Synthetic oligonucleotide
  Sense strand starting at position 2047 of SEQ ID NO: 1889159
ucacaaugaguguaaccau

SEQ ID NO: 2582021 - RNA, 19 nt, Artificial Sequence
  Description of Artificial Sequence: Synthetic oligonucleotide
  Antisense strand to SEQ ID NO: 2582020
augguuacacucauuguga

SEQ ID NO: 2582022 - RNA, 19 nt, Artificial Sequence
  Description of Artificial Sequence: Synthetic oligonucleotide
  Sense strand starting at position 2054 of SEQ ID NO: 1889159
gaguguaaccauugccuag

SEQ ID NO: 2582023 - RNA, 19 nt, Artificial Sequence
  Description of Artificial Sequence: Synthetic oligonucleotide
  Antisense strand to SEQ ID NO: 2582022
cuaggcaaugguuacacuc

SEQ ID NO: 2582024 - RNA, 19 nt, Artificial Sequence
  Description of Artificial Sequence: Synthetic oligonucleotide
  Sense strand starting at position 2085 of SEQ ID NO: 1889159
guggcuugguggagaagaa

SEQ ID NO: 2582025 - RNA, 19 nt, Artificial Sequence
  Description of Artificial Sequence: Synthetic oligonucleotide
  Antisense strand to SEQ ID NO: 2582024
uucuucuccaccaagccac

SEQ ID NO: 2582026 - RNA, 19 nt, Artificial Sequence
  Description of Artificial Sequence: Synthetic oligonucleotide
  Sense strand starting at position 2100 of SEQ ID NO: 1889159
agaagaccuccguggaguu

SEQ ID NO: 2582027 - RNA, 19 nt, Artificial Sequence
  Description of Artificial Sequence: Synthetic oligonucleotide
  Antisense strand to SEQ ID NO: 2582026
aacuccacggaggucuucu

SEQ ID NO: 2582028 - RNA, 19 nt, Artificial Sequence
  Description of Artificial Sequence: Synthetic oligonucleotide
  Sense strand starting at position 2147 of SEQ ID NO: 1889159
cacugugggauccauggua

SEQ ID NO: 2582029 - RNA, 19 nt, Artificial Sequence
  Description of Artificial Sequence: Synthetic oligonucleotide
  Antisense strand to SEQ ID NO: 2582028
uaccauggaucccacagug

SEQ ID NO: 2582030 - RNA, 19 nt, Artificial Sequence
  Description of Artificial Sequence: Synthetic oligonucleotide
  Sense strand starting at position 2162 of SEQ ID NO: 1889159
gguauuguuccaugauccu

SEQ ID NO: 2582031 - RNA, 19 nt, Artificial Sequence
  Description of Artificial Sequence: Synthetic oligonucleotide
  Antisense strand to SEQ ID NO: 2582030
aggaucauggaacaauacc

SEQ ID NO: 2582032 - RNA, 19 nt, Artificial Sequence
  Description of Artificial Sequence: Synthetic oligonucleotide
  Sense strand starting at position 2327 of SEQ ID NO: 1889159
cacugugauuucuagguag

SEQ ID NO: 2582033 - RNA, 19 nt, Artificial Sequence
  Description of Artificial Sequence: Synthetic oligonucleotide
  Antisense strand to SEQ ID NO: 2582032
cuaccuagaaaucacagug

SEQ ID NO: 2582034 - RNA, 19 nt, Artificial Sequence
  Description of Artificial Sequence: Synthetic oligonucleotide
  Sense strand starting at position 2526 of SEQ ID NO: 1889159
aacugagcuccuggaagaa

SEQ ID NO: 2582035 - RNA, 19 nt, Artificial Sequence
  Description of Artificial Sequence: Synthetic oligonucleotide
  Antisense strand to SEQ ID NO: 2582034
uucuuccaggagcucaguu

SEQ ID NO: 2582036 - RNA, 19 nt, Artificial Sequence
  Description of Artificial Sequence: Synthetic oligonucleotide
  Sense strand starting at position 2589 of SEQ ID NO: 1889159
acgugaaaggguuguaaua

SEQ ID NO: 2582037 - RNA, 19 nt, Artificial Sequence
  Description of Artificial Sequence: Synthetic oligonucleotide
  Antisense strand to SEQ ID NO: 2582036
uauuacaacccuuucacgu

SEQ ID NO: 2582038 - RNA, 19 nt, Artificial Sequence
  Description of Artificial Sequence: Synthetic oligonucleotide
  Sense strand starting at position 2599 of SEQ ID NO: 1889159
guuguaauagauugagauc

SEQ ID NO: 2582039 - RNA, 19 nt, Artificial Sequence
  Description of Artificial Sequence: Synthetic oligonucleotide
  Antisense strand to SEQ ID NO: 2582038
gaucucaaucuauuacaac

SEQ ID NO: 2582040 - RNA, 19 nt, Artificial Sequence
  Description of Artificial Sequence: Synthetic oligonucleotide
  Sense strand starting at position 2634 of SEQ ID NO: 1889159
gguuagagugguggguuaa

SEQ ID NO: 2582041 - RNA, 19 nt, Artificial Sequence
  Description of Artificial Sequence: Synthetic oligonucleotide
  Antisense strand to SEQ ID NO: 2582040
uuaacccaccacucuaacc

SEQ ID NO: 2582042 - RNA, 19 nt, Artificial Sequence
  Description of Artificial Sequence: Synthetic oligonucleotide
  Sense strand starting at position 2635 of SEQ ID NO: 1889159
guuagagugguggguuaaa

SEQ ID NO: 2582043 - RNA, 19 nt, Artificial Sequence
  Description of Artificial Sequence: Synthetic oligonucleotide
  Antisense strand to SEQ ID NO: 2582042
uuuaacccaccacucuaac

SEQ ID NO: 2582044 - RNA, 19 nt, Artificial Sequence
  Description of Artificial Sequence: Synthetic oligonucleotide
  Sense strand starting at position 2820 of SEQ ID NO: 1889159
agaguucucuuucucaucu

SEQ ID NO: 2582045 - RNA, 19 nt, Artificial Sequence
  Description of Artificial Sequence: Synthetic oligonucleotide
  Antisense strand to SEQ ID NO: 2582044
agaugagaaagagaacucu

SEQ ID NO: 2582046 - RNA, 19 nt, Artificial Sequence
  Description of Artificial Sequence: Synthetic oligonucleotide
  Sense strand starting at position 2870 of SEQ ID NO: 1889159
gauagugauuuauguaaug

SEQ ID NO: 2582047 - RNA, 19 nt, Artificial Sequence
  Description of Artificial Sequence: Synthetic oligonucleotide
  Antisense strand to SEQ ID NO: 2582046
cauuacauaaaucacuauc

SEQ ID NO: 2582048 - RNA, 19 nt, Artificial Sequence
  Description of Artificial Sequence: Synthetic oligonucleotide
  Sense strand starting at position 3065 of SEQ ID NO: 1889159
gggaucaaguaguuauaau

SEQ ID NO: 2582049 - RNA, 19 nt, Artificial Sequence
  Description of Artificial Sequence: Synthetic oligonucleotide
  Antisense strand to SEQ ID NO: 2582048
auuauaacuacuugauccc

SEQ ID NO: 2582050 - RNA, 19 nt, Artificial Sequence
  Description of Artificial Sequence: Synthetic oligonucleotide
  Sense strand starting at position 3373 of SEQ ID NO: 1889159
uagggcuugucaucuucuu

SEQ ID NO: 2582051 - RNA, 19 nt, Artificial Sequence
  Description of Artificial Sequence: Synthetic oligonucleotide
  Antisense strand to SEQ ID NO: 2582050
aagaagaugacaagcccua

SEQ ID NO: 2582052 - RNA, 19 nt, Artificial Sequence
  Description of Artificial Sequence: Synthetic oligonucleotide
  Sense strand starting at position 3404 of SEQ ID NO: 1889159
ggagguguuaucugggcuu

SEQ ID NO: 2582053 - RNA, 19 nt, Artificial Sequence
  Description of Artificial Sequence: Synthetic oligonucleotide
  Antisense strand to SEQ ID NO: 2582052
aagcccagauaacaccucc

SEQ ID NO: 2582054 - RNA, 19 nt, Artificial Sequence
  Description of Artificial Sequence: Synthetic oligonucleotide
  Sense strand starting at position 3464 of SEQ ID NO: 1889159
cuaugauggauccacgcua

SEQ ID NO: 2582055 - RNA, 19 nt, Artificial Sequence
  Description of Artificial Sequence: Synthetic oligonucleotide
  Antisense strand to SEQ ID NO: 2582054
uagcguggauccaucauag

SEQ ID NO: 2582056 - RNA, 19 nt, Artificial Sequence
  Description of Artificial Sequence: Synthetic oligonucleotide
  Sense strand starting at position 3469 of SEQ ID NO: 1889159
auggauccacgcuagaauu

SEQ ID NO: 2582057 - RNA, 19 nt, Artificial Sequence
  Description of Artificial Sequence: Synthetic oligonucleotide
  Antisense strand to SEQ ID NO: 2582056
aauucuagcguggauccau

SEQ ID NO: 2582058 - RNA, 19 nt, Artificial Sequence
  Description of Artificial Sequence: Synthetic oligonucleotide
  Sense strand starting at position 3493 of SEQ ID NO: 1889159
uacauuuguggcuguggga

SEQ ID NO: 2582059 - RNA, 19 nt, Artificial Sequence
  Description of Artificial Sequence: Synthetic oligonucleotide
  Antisense strand to SEQ ID NO: 2582058
ucccacagccacaaaugua

SEQ ID NO: 2582060 - RNA, 19 nt, Artificial Sequence
  Description of Artificial Sequence: Synthetic oligonucleotide
  Sense strand starting at position 3586 of SEQ ID NO: 1889159
cccgaucaucugggaagaa

SEQ ID NO: 2582061 - RNA, 19 nt, Artificial Sequence
  Description of Artificial Sequence: Synthetic oligonucleotide
  Antisense strand to SEQ ID NO: 2582060
uucuucccagaugaucggg

SEQ ID NO: 2582062 - RNA, 19 nt, Artificial Sequence
  Description of Artificial Sequence: Synthetic oligonucleotide
  Sense strand starting at position 3618 of SEQ ID NO: 1889159
ggcugaaauuguuucugua

SEQ ID NO: 2582063 - RNA, 19 nt, Artificial Sequence
  Description of Artificial Sequence: Synthetic oligonucleotide
  Antisense strand to SEQ ID NO: 2582062
uacagaaacaauuucagcc

SEQ ID NO: 2582064 - RNA, 19 nt, Artificial Sequence
  Description of Artificial Sequence: Synthetic oligonucleotide
  Sense strand starting at position 3620 of SEQ ID NO: 1889159
cugaaauuguuucuguaau

SEQ ID NO: 2582065 - RNA, 19 nt, Artificial Sequence
  Description of Artificial Sequence: Synthetic oligonucleotide
  Antisense strand to SEQ ID NO: 2582064
auuacagaaacaauuucag

SEQ ID NO: 2582066 - RNA, 19 nt, Artificial Sequence
  Description of Artificial Sequence: Synthetic oligonucleotide
  Sense strand starting at position 3640 of SEQ ID NO: 1889159
uucccuagagccuguaauu

SEQ ID NO: 2582067 - RNA, 19 nt, Artificial Sequence
  Description of Artificial Sequence: Synthetic oligonucleotide
  Antisense strand to SEQ ID NO: 2582066
aauuacaggcucuagggaa

SEQ ID NO: 2582068 - RNA, 19 nt, Artificial Sequence
  Description of Artificial Sequence: Synthetic oligonucleotide
  Sense strand starting at position 3806 of SEQ ID NO: 1889159
gagcuugugccggcuuuaa

SEQ ID NO: 2582069 - RNA, 19 nt, Artificial Sequence
  Description of Artificial Sequence: Synthetic oligonucleotide
  Antisense strand to SEQ ID NO: 2582068
uuaaagccggcacaagcuc

SEQ ID NO: 2582070 - RNA, 19 nt, Artificial Sequence
  Description of Artificial Sequence: Synthetic oligonucleotide
  Sense strand starting at position 3808 of SEQ ID NO: 1889159
gcuugugccggcuuuaauc

SEQ ID NO: 2582071 - RNA, 19 nt, Artificial Sequence
  Description of Artificial Sequence: Synthetic oligonucleotide
  Antisense strand to SEQ ID NO: 2582070
gauuaaagccggcacaagc

SEQ ID NO: 2582072 - RNA, 19 nt, Artificial Sequence
  Description of Artificial Sequence: Synthetic oligonucleotide
  Sense strand starting at position 244 of SEQ ID NO: 1889160
guugaaucccagugaaagc

SEQ ID NO: 2582073 - RNA, 19 nt, Artificial Sequence
  Description of Artificial Sequence: Synthetic oligonucleotide
  Antisense strand to SEQ ID NO: 2582072
gcuuucacugggauucaac

SEQ ID NO: 2582074 - RNA, 19 nt, Artificial Sequence
  Description of Artificial Sequence: Synthetic oligonucleotide
  Sense strand starting at position 286 of SEQ ID NO: 1889160
uaugaaggcuugccugaga

SEQ ID NO: 2582075 - RNA, 19 nt, Artificial Sequence
  Description of Artificial Sequence: Synthetic oligonucleotide
  Antisense strand to SEQ ID NO: 2582074
ucucaggcaagccuucaua

SEQ ID NO: 2582076 - RNA, 19 nt, Artificial Sequence
  Description of Artificial Sequence: Synthetic oligonucleotide
  Sense strand starting at position 289 of SEQ ID NO: 1889160
gaaggcuugccugagagaa

SEQ ID NO: 2582077 - RNA, 19 nt, Artificial Sequence
  Description of Artificial Sequence: Synthetic oligonucleotide
  Antisense strand to SEQ ID NO: 2582076
uucucucaggcaagccuuc

SEQ ID NO: 2582078 - RNA, 19 nt, Artificial Sequence
  Description of Artificial Sequence: Synthetic oligonucleotide
  Sense strand starting at position 329 of SEQ ID NO: 1889160
ucaagcuuuguugaauaau

SEQ ID NO: 2582079 - RNA, 19 nt, Artificial Sequence
  Description of Artificial Sequence: Synthetic oligonucleotide
  Antisense strand to SEQ ID NO: 2582078
auuauucaacaaagcuuga

SEQ ID NO: 2582080 - RNA, 19 nt, Artificial Sequence
  Description of Artificial Sequence: Synthetic oligonucleotide
  Sense strand starting at position 338 of SEQ ID NO: 1889160
guugaauaauuccugucag

SEQ ID NO: 2582081 - RNA, 19 nt, Artificial Sequence
  Description of Artificial Sequence: Synthetic oligonucleotide
  Antisense strand to SEQ ID NO: 2582080
cugacaggaauuauucaac

SEQ ID NO: 2582082 - RNA, 19 nt, Artificial Sequence
  Description of Artificial Sequence: Synthetic oligonucleotide
  Sense strand starting at position 391 of SEQ ID NO: 1889160
cucagcucccacuaugaga

SEQ ID NO: 2582083 - RNA, 19 nt, Artificial Sequence
  Description of Artificial Sequence: Synthetic oligonucleotide
  Antisense strand to SEQ ID NO: 2582082
ucucauagugggagcugag

SEQ ID NO: 2582084 - RNA, 19 nt, Artificial Sequence
  Description of Artificial Sequence: Synthetic oligonucleotide
  Sense strand starting at position 553 of SEQ ID NO: 1889160
ucugauaguagugggugaa

SEQ ID NO: 2582085 - RNA, 19 nt, Artificial Sequence
  Description of Artificial Sequence: Synthetic oligonucleotide
  Antisense strand to SEQ ID NO: 2582084
uucacccacuacuaucaga

SEQ ID NO: 2582086 - RNA, 19 nt, Artificial Sequence
  Description of Artificial Sequence: Synthetic oligonucleotide
  Sense strand starting at position 708 of SEQ ID NO: 1889160
uucugaaauguuuaaugug

SEQ ID NO: 2582087 - RNA, 19 nt, Artificial Sequence
  Description of Artificial Sequence: Synthetic oligonucleotide
  Antisense strand to SEQ ID NO: 2582086
cacauuaaacauuucagaa

SEQ ID NO: 2582088 - RNA, 19 nt, Artificial Sequence
  Description of Artificial Sequence: Synthetic oligonucleotide
  Sense strand starting at position 787 of SEQ ID NO: 1889160
agaagaggccauuguggaa

SEQ ID NO: 2582089 - RNA, 19 nt, Artificial Sequence
  Description of Artificial Sequence: Synthetic oligonucleotide
  Antisense strand to SEQ ID NO: 2582088
uuccacaauggccucuucu

SEQ ID NO: 2582090 - RNA, 19 nt, Artificial Sequence
  Description of Artificial Sequence: Synthetic oligonucleotide
  Sense strand starting at position 863 of SEQ ID NO: 1889160
gccucaaauccagaguuug

SEQ ID NO: 2582091 - RNA, 19 nt, Artificial Sequence
  Description of Artificial Sequence: Synthetic oligonucleotide
  Antisense strand to SEQ ID NO: 2582090
caaacucuggauuugaggc

SEQ ID NO: 2582092 - RNA, 19 nt, Artificial Sequence
  Description of Artificial Sequence: Synthetic oligonucleotide
  Sense strand starting at position 958 of SEQ ID NO: 1889160
cagacagauugugcaauua

SEQ ID NO: 2582093 - RNA, 19 nt, Artificial Sequence
  Description of Artificial Sequence: Synthetic oligonucleotide
  Antisense strand to SEQ ID NO: 2582092
uaauugcacaaucugucug

SEQ ID NO: 2582094 - RNA, 19 nt, Artificial Sequence
  Description of Artificial Sequence: Synthetic oligonucleotide
  Sense strand starting at position 1547 of SEQ ID NO: 1889160
gccacauuccuuuaaguag

SEQ ID NO: 2582095 - RNA, 19 nt, Artificial Sequence
  Description of Artificial Sequence: Synthetic oligonucleotide
  Antisense strand to SEQ ID NO: 2582094
cuacuuaaaggaauguggc

SEQ ID NO: 2582096 - RNA, 19 nt, Artificial Sequence
  Description of Artificial Sequence: Synthetic oligonucleotide
  Sense strand starting at position 1739 of SEQ ID NO: 1889160
gggaacaugugggcuguaa

SEQ ID NO: 2582097 - RNA, 19 nt, Artificial Sequence
  Description of Artificial Sequence: Synthetic oligonucleotide
  Antisense strand to SEQ ID NO: 2582096
uuacagcccacauguuccc

SEQ ID NO: 2582098 - RNA, 19 nt, Artificial Sequence
  Description of Artificial Sequence: Synthetic oligonucleotide
  Sense strand starting at position 1741 of SEQ ID NO: 1889160
gaacaugugggcuguaacu

SEQ ID NO: 2582099 - RNA, 19 nt, Artificial Sequence
  Description of Artificial Sequence: Synthetic oligonucleotide
  Antisense strand to SEQ ID NO: 2582098
aguuacagcccacauguuc

SEQ ID NO: 2582100 - RNA, 19 nt, Artificial Sequence
  Description of Artificial Sequence: Synthetic oligonucleotide
  Sense strand starting at position 1747 of SEQ ID NO: 1889160
gugggcuguaacuagaaau

SEQ ID NO: 2582101 - RNA, 19 nt, Artificial Sequence
  Description of Artificial Sequence: Synthetic oligonucleotide
  Antisense strand to SEQ ID NO: 2582100
auuucuaguuacagcccac

SEQ ID NO: 2582102 - RNA, 19 nt, Artificial Sequence
  Description of Artificial Sequence: Synthetic oligonucleotide
  Sense strand starting at position 1919 of SEQ ID NO: 1889160
ggaucaugagacuguccca

SEQ ID NO: 2582103 - RNA, 19 nt, Artificial Sequence
  Description of Artificial Sequence: Synthetic oligonucleotide
  Antisense strand to SEQ ID NO: 2582102
ugggacagucucaugaucc

SEQ ID NO: 2582104 - RNA, 19 nt, Artificial Sequence
  Description of Artificial Sequence: Synthetic oligonucleotide
  Sense strand starting at position 1922 of SEQ ID NO: 1889160
ucaugagacugucccaagu

SEQ ID NO: 2582105 - RNA, 19 nt, Artificial Sequence
  Description of Artificial Sequence: Synthetic oligonucleotide
  Antisense strand to SEQ ID NO: 2582104
acuugggacagucucauga

SEQ ID NO: 2582106 - RNA, 19 nt, Artificial Sequence
  Description of Artificial Sequence: Synthetic oligonucleotide
  Sense strand starting at position 2210 of SEQ ID NO: 1889160
gcuagaagccauggucaga

SEQ ID NO: 2582107 - RNA, 19 nt, Artificial Sequence
  Description of Artificial Sequence: Synthetic oligonucleotide
  Antisense strand to SEQ ID NO: 2582106
ucugaccauggcuucuagc

SEQ ID NO: 2582108 - RNA, 19 nt, Artificial Sequence
  Description of Artificial Sequence: Synthetic oligonucleotide
  Sense strand starting at position 2370 of SEQ ID NO: 1889160
ucgggucucaugggaauug

SEQ ID NO: 2582109 - RNA, 19 nt, Artificial Sequence
  Description of Artificial Sequence: Synthetic oligonucleotide
  Antisense strand to SEQ ID NO: 2582108
caauucccaugagacccga

SEQ ID NO: 2582110 - RNA, 19 nt, Artificial Sequence
  Description of Artificial Sequence: Synthetic oligonucleotide
  Sense strand starting at position 2413 of SEQ ID NO: 1889160
ggguucuuugggugagaga

SEQ ID NO: 2582111 - RNA, 19 nt, Artificial Sequence
  Description of Artificial Sequence: Synthetic oligonucleotide
  Antisense strand to SEQ ID NO: 2582110
ucucucacccaaagaaccc

SEQ ID NO: 2582112 - RNA, 19 nt, Artificial Sequence
  Description of Artificial Sequence: Synthetic oligonucleotide
  Sense strand starting at position 2422 of SEQ ID NO: 1889160
gggugagagaauuauacgu

SEQ ID NO: 2582113 - RNA, 19 nt, Artificial Sequence
  Description of Artificial Sequence: Synthetic oligonucleotide
  Antisense strand to SEQ ID NO: 2582112
acguauaauucucucaccc

SEQ ID NO: 2582114 - RNA, 19 nt, Artificial Sequence
  Description of Artificial Sequence: Synthetic oligonucleotide
  Sense strand starting at position 2427 of SEQ ID NO: 1889160
agagaauuauacgugagac

SEQ ID NO: 2582115 - RNA, 19 nt, Artificial Sequence
  Description of Artificial Sequence: Synthetic oligonucleotide
  Antisense strand to SEQ ID NO: 2582114
gucucacguauaauucucu

SEQ ID NO: 2582116 - RNA, 19 nt, Artificial Sequence
  Description of Artificial Sequence: Synthetic oligonucleotide
  Sense strand starting at position 2446 of SEQ ID NO: 1889160
cccagagaugggugccaau

SEQ ID NO: 2582117 - RNA, 19 nt, Artificial Sequence
  Description of Artificial Sequence: Synthetic oligonucleotide
  Antisense strand to SEQ ID NO: 2582116
auuggcacccaucucuggg

SEQ ID NO: 2582118 - RNA, 19 nt, Artificial Sequence
  Description of Artificial Sequence: Synthetic oligonucleotide
  Sense strand starting at position 2463 of SEQ ID NO: 1889160
augaaagauggcugggcua

SEQ ID NO: 2582119 - RNA, 19 nt, Artificial Sequence
  Description of Artificial Sequence: Synthetic oligonucleotide
  Antisense strand to SEQ ID NO: 2582118
uagcccagccaucuuucau

SEQ ID NO: 2582120 - RNA, 19 nt, Artificial Sequence
  Description of Artificial Sequence: Synthetic oligonucleotide
  Sense strand starting at position 2465 of SEQ ID NO: 1889160
gaaagauggcugggcuauu

SEQ ID NO: 2582121 - RNA, 19 nt, Artificial Sequence
  Description of Artificial Sequence: Synthetic oligonucleotide
  Antisense strand to SEQ ID NO: 2582120
aauagcccagccaucuuuc

SEQ ID NO: 2582122 - RNA, 19 nt, Artificial Sequence
  Description of Artificial Sequence: Synthetic oligonucleotide
  Sense strand starting at position 2685 of SEQ ID NO: 1889160
uacuguggauucucuauga

SEQ ID NO: 2582123 - RNA, 19 nt, Artificial Sequence
  Description of Artificial Sequence: Synthetic oligonucleotide
  Antisense strand to SEQ ID NO: 2582122
ucauagagaauccacagua

SEQ ID NO: 2582124 - RNA, 19 nt, Artificial Sequence
  Description of Artificial Sequence: Synthetic oligonucleotide
  Sense strand starting at position 2689 of SEQ ID NO: 1889160
guggauucucuaugaaaga

SEQ ID NO: 2582125 - RNA, 19 nt, Artificial Sequence
  Description of Artificial Sequence: Synthetic oligonucleotide
  Antisense strand to SEQ ID NO: 2582124
ucuuucauagagaauccac

SEQ ID NO: 2582126 - RNA, 19 nt, Artificial Sequence
  Description of Artificial Sequence: Synthetic oligonucleotide
  Sense strand starting at position 2728 of SEQ ID NO: 1889160
cucagagaaugaccuguuu

SEQ ID NO: 2582127 - RNA, 19 nt, Artificial Sequence
  Description of Artificial Sequence: Synthetic oligonucleotide
  Antisense strand to SEQ ID NO: 2582126
aaacaggucauucucugag

SEQ ID NO: 2582128 - RNA, 19 nt, Artificial Sequence
  Description of Artificial Sequence: Synthetic oligonucleotide
  Sense strand starting at position 2905 of SEQ ID NO: 1889160
gccaauagaucugugguga

SEQ ID NO: 2582129 - RNA, 19 nt, Artificial Sequence
  Description of Artificial Sequence: Synthetic oligonucleotide
  Antisense strand to SEQ ID NO: 2582128
ucaccacagaucuauuggc

SEQ ID NO: 2582130 - RNA, 19 nt, Artificial Sequence
  Description of Artificial Sequence: Synthetic oligonucleotide
  Sense strand starting at position 2906 of SEQ ID NO: 1889160
ccaauagaucuguggugag

SEQ ID NO: 2582131 - RNA, 19 nt, Artificial Sequence
  Description of Artificial Sequence: Synthetic oligonucleotide
  Antisense strand to SEQ ID NO: 2582130
cucaccacagaucuauugg

SEQ ID NO: 2582132 - RNA, 19 nt, Artificial Sequence
  Description of Artificial Sequence: Synthetic oligonucleotide
  Sense strand starting at position 2950 of SEQ ID NO: 1889160
agugaaagaccuuguauac

SEQ ID NO: 2582133 - RNA, 19 nt, Artificial Sequence
  Description of Artificial Sequence: Synthetic oligonucleotide
  Antisense strand to SEQ ID NO: 2582132
guauacaaggucuuucacu

SEQ ID NO: 2582134 - RNA, 19 nt, Artificial Sequence
  Description of Artificial Sequence: Synthetic oligonucleotide
  Sense strand starting at position 2982 of SEQ ID NO: 1889160
uugcauaugcaaugaaaca

SEQ ID NO: 2582135 - RNA, 19 nt, Artificial Sequence
  Description of Artificial Sequence: Synthetic oligonucleotide
  Antisense strand to SEQ ID NO: 2582134
uguuucauugcauaugcaa

SEQ ID NO: 2582136 - RNA, 19 nt, Artificial Sequence
  Description of Artificial Sequence: Synthetic oligonucleotide
  Sense strand starting at position 3217 of SEQ ID NO: 1889160
cuccaugaacugugaauug

SEQ ID NO: 2582137 - RNA, 19 nt, Artificial Sequence
  Description of Artificial Sequence: Synthetic oligonucleotide
  Antisense strand to SEQ ID NO: 2582136
caauucacaguucauggag

SEQ ID NO: 2582138 - RNA, 19 nt, Artificial Sequence
  Description of Artificial Sequence: Synthetic oligonucleotide
  Sense strand starting at position 3265 of SEQ ID NO: 1889160
aggaaauccuaggccauga

SEQ ID NO: 2582139 - RNA, 19 nt, Artificial Sequence
  Description of Artificial Sequence: Synthetic oligonucleotide
  Antisense strand to SEQ ID NO: 2582138
ucauggccuaggauuuccu

SEQ ID NO: 2582140 - RNA, 19 nt, Artificial Sequence
  Description of Artificial Sequence: Synthetic oligonucleotide
  Sense strand starting at position 3269 of SEQ ID NO: 1889160
aauccuaggccaugaggaa

SEQ ID NO: 2582141 - RNA, 19 nt, Artificial Sequence
  Description of Artificial Sequence: Synthetic oligonucleotide
  Antisense strand to SEQ ID NO: 2582140
uuccucauggccuaggauu

SEQ ID NO: 2582142 - RNA, 19 nt, Artificial Sequence
  Description of Artificial Sequence: Synthetic oligonucleotide
  Sense strand starting at position 3475 of SEQ ID NO: 1889160
ugaacugcuucugcaauua

SEQ ID NO: 2582143 - RNA, 19 nt, Artificial Sequence
  Description of Artificial Sequence: Synthetic oligonucleotide
  Antisense strand to SEQ ID NO: 2582142
uaauugcagaagcaguuca

SEQ ID NO: 2582144 - RNA, 19 nt, Artificial Sequence
  Description of Artificial Sequence: Synthetic oligonucleotide
  Sense strand starting at position 3528 of SEQ ID NO: 1889160
gcgucaucagucuucacgu

SEQ ID NO: 2582145 - RNA, 19 nt, Artificial Sequence
  Description of Artificial Sequence: Synthetic oligonucleotide
  Antisense strand to SEQ ID NO: 2582144
acgugaagacugaugacgc

SEQ ID NO: 2582146 - RNA, 19 nt, Artificial Sequence
  Description of Artificial Sequence: Synthetic oligonucleotide
  Sense strand starting at position 3632 of SEQ ID NO: 1889160
cucucuguccuagaaugaa

SEQ ID NO: 2582147 - RNA, 19 nt, Artificial Sequence
  Description of Artificial Sequence: Synthetic oligonucleotide
  Antisense strand to SEQ ID NO: 2582146
uucauucuaggacagagag

SEQ ID NO: 2582148 - RNA, 19 nt, Artificial Sequence
  Description of Artificial Sequence: Synthetic oligonucleotide
  Sense strand starting at position 3635 of SEQ ID NO: 1889160
ucuguccuagaaugaaauc

SEQ ID NO: 2582149 - RNA, 19 nt, Artificial Sequence
  Description of Artificial Sequence: Synthetic oligonucleotide
  Antisense strand to SEQ ID NO: 2582148
gauuucauucuaggacaga

SEQ ID NO: 2582150 - RNA, 19 nt, Artificial Sequence
  Description of Artificial Sequence: Synthetic oligonucleotide
  Sense strand starting at position 3936 of SEQ ID NO: 1889160
ggaaguguugccgugcguu

SEQ ID NO: 2582151 - RNA, 19 nt, Artificial Sequence
  Description of Artificial Sequence: Synthetic oligonucleotide
  Antisense strand to SEQ ID NO: 2582150
aacgcacggcaacacuucc

SEQ ID NO: 2582152 - RNA, 19 nt, Artificial Sequence
  Description of Artificial Sequence: Synthetic oligonucleotide
  Sense strand starting at position 245 of SEQ ID NO: 1889161
guugaaucccagugaaagc

SEQ ID NO: 2582153 - RNA, 19 nt, Artificial Sequence
  Description of Artificial Sequence: Synthetic oligonucleotide
  Antisense strand to SEQ ID NO: 2582152
gcuuucacugggauucaac

SEQ ID NO: 2582154 - RNA, 19 nt, Artificial Sequence
  Description of Artificial Sequence: Synthetic oligonucleotide
  Sense strand starting at position 290 of SEQ ID NO: 1889161
gaaggcuugccugagagaa

SEQ ID NO: 2582155 - RNA, 19 nt, Artificial Sequence
  Description of Artificial Sequence: Synthetic oligonucleotide
  Antisense strand to SEQ ID NO: 2582154
uucucucaggcaagccuuc

SEQ ID NO: 2582156 - RNA, 19 nt, Artificial Sequence
  Description of Artificial Sequence: Synthetic oligonucleotide
  Sense strand starting at position 330 of SEQ ID NO: 1889161
ucaagcuuuguugaauaau

SEQ ID NO: 2582157 - RNA, 19 nt, Artificial Sequence
  Description of Artificial Sequence: Synthetic oligonucleotide
  Antisense strand to SEQ ID NO: 2582156
auuauucaacaaagcuuga

SEQ ID NO: 2582158 - RNA, 19 nt, Artificial Sequence
  Description of Artificial Sequence: Synthetic oligonucleotide
  Sense strand starting at position 339 of SEQ ID NO: 1889161
guugaauaauuccugucag

SEQ ID NO: 2582159 - RNA, 19 nt, Artificial Sequence
  Description of Artificial Sequence: Synthetic oligonucleotide
  Antisense strand to SEQ ID NO: 2582158
cugacaggaauuauucaac

SEQ ID NO: 2582160 - RNA, 19 nt, Artificial Sequence
  Description of Artificial Sequence: Synthetic oligonucleotide
  Sense strand starting at position 392 of SEQ ID NO: 1889161
cucagcucccacuaugaga

SEQ ID NO: 2582161 - RNA, 19 nt, Artificial Sequence
  Description of Artificial Sequence: Synthetic oligonucleotide
  Antisense strand to SEQ ID NO: 2582160
ucucauagugggagcugag

SEQ ID NO: 2582162 - RNA, 19 nt, Artificial Sequence
  Description of Artificial Sequence: Synthetic oligonucleotide
  Sense strand starting at position 554 of SEQ ID NO: 1889161
ucugauaguagugggugaa

SEQ ID NO: 2582163 - RNA, 19 nt, Artificial Sequence
  Description of Artificial Sequence: Synthetic oligonucleotide
  Antisense strand to SEQ ID NO: 2582162
uucacccacuacuaucaga

SEQ ID NO: 2582164 - RNA, 19 nt, Artificial Sequence
  Description of Artificial Sequence: Synthetic oligonucleotide
  Sense strand starting at position 709 of SEQ ID NO: 1889161
uucugaaauguuuaaugug

SEQ ID NO: 2582165 - RNA, 19 nt, Artificial Sequence
  Description of Artificial Sequence: Synthetic oligonucleotide
  Antisense strand to SEQ ID NO: 2582164
cacauuaaacauuucagaa

SEQ ID NO: 2582166 - RNA, 19 nt, Artificial Sequence
  Description of Artificial Sequence: Synthetic oligonucleotide
  Sense strand starting at position 788 of SEQ ID NO: 1889161
agaagaggccauuguggaa

SEQ ID NO: 2582167 - RNA, 19 nt, Artificial Sequence
  Description of Artificial Sequence: Synthetic oligonucleotide
  Antisense strand to SEQ ID NO: 2582166
uuccacaauggccucuucu

SEQ ID NO: 2582168 - RNA, 19 nt, Artificial Sequence
  Description of Artificial Sequence: Synthetic oligonucleotide
  Sense strand starting at position 841 of SEQ ID NO: 1889161
acauuugacucuggguaua

SEQ ID NO: 2582169 - RNA, 19 nt, Artificial Sequence
  Description of Artificial Sequence: Synthetic oligonucleotide
  Antisense strand to SEQ ID NO: 2582168
uauacccagagucaaaugu

SEQ ID NO: 2582170 - RNA, 19 nt, Artificial Sequence
  Description of Artificial Sequence: Synthetic oligonucleotide
  Sense strand starting at position 864 of SEQ ID NO: 1889161
gccucaaauccagaguuug

SEQ ID NO: 2582171 - RNA, 19 nt, Artificial Sequence
  Description of Artificial Sequence: Synthetic oligonucleotide
  Antisense strand to SEQ ID NO: 2582170
caaacucuggauuugaggc

SEQ ID NO: 2582172 - RNA, 19 nt, Artificial Sequence
  Description of Artificial Sequence: Synthetic oligonucleotide
  Sense strand starting at position 959 of SEQ ID NO: 1889161
cagacagauugugcaauua

SEQ ID NO: 2582173 - RNA, 19 nt, Artificial Sequence
  Description of Artificial Sequence: Synthetic oligonucleotide
  Antisense strand to SEQ ID NO: 2582172
uaauugcacaaucugucug

SEQ ID NO: 2582174 - RNA, 19 nt, Artificial Sequence
  Description of Artificial Sequence: Synthetic oligonucleotide
  Sense strand starting at position 1740 of SEQ ID NO: 1889161
gggaacaugugggcuguaa

SEQ ID NO: 2582175 - RNA, 19 nt, Artificial Sequence
  Description of Artificial Sequence: Synthetic oligonucleotide
  Antisense strand to SEQ ID NO: 2582174
uuacagcccacauguuccc

SEQ ID NO: 2582176 - RNA, 19 nt, Artificial Sequence
  Description of Artificial Sequence: Synthetic oligonucleotide
  Sense strand starting at position 1742 of SEQ ID NO: 1889161
gaacaugugggcuguaacu

SEQ ID NO: 2582177 - RNA, 19 nt, Artificial Sequence
  Description of Artificial Sequence: Synthetic oligonucleotide
  Antisense strand to SEQ ID NO: 2582176
aguuacagcccacauguuc

SEQ ID NO: 2582178 - RNA, 19 nt, Artificial Sequence
  Description of Artificial Sequence: Synthetic oligonucleotide
  Sense strand starting at position 1748 of SEQ ID NO: 1889161
gugggcuguaacuagaaau

SEQ ID NO: 2582179 - RNA, 19 nt, Artificial Sequence
  Description of Artificial Sequence: Synthetic oligonucleotide
  Antisense strand to SEQ ID NO: 2582178
auuucuaguuacagcccac

SEQ ID NO: 2582180 - RNA, 19 nt, Artificial Sequence
  Description of Artificial Sequence: Synthetic oligonucleotide
  Sense strand starting at position 2211 of SEQ ID NO: 1889161
gcuagaagccauggucaga

SEQ ID NO: 2582181 - RNA, 19 nt, Artificial Sequence
  Description of Artificial Sequence: Synthetic oligonucleotide
  Antisense strand to SEQ ID NO: 2582180
ucugaccauggcuucuagc

SEQ ID NO: 2582182 - RNA, 19 nt, Artificial Sequence
  Description of Artificial Sequence: Synthetic oligonucleotide
  Sense strand starting at position 2323 of SEQ ID NO: 1889161
ggaaacugcucuuccuacu

SEQ ID NO: 2582183 - RNA, 19 nt, Artificial Sequence
  Description of Artificial Sequence: Synthetic oligonucleotide
  Antisense strand to SEQ ID NO: 2582182
aguaggaagagcaguuucc

SEQ ID NO: 2582184 - RNA, 19 nt, Artificial Sequence
  Description of Artificial Sequence: Synthetic oligonucleotide
  Sense strand starting at position 2371 of SEQ ID NO: 1889161
ucgggucucaugggaauug

SEQ ID NO: 2582185 - RNA, 19 nt, Artificial Sequence
  Description of Artificial Sequence: Synthetic oligonucleotide
  Antisense strand to SEQ ID NO: 2582184
caauucccaugagacccga

SEQ ID NO: 2582186 - RNA, 19 nt, Artificial Sequence
  Description of Artificial Sequence: Synthetic oligonucleotide
  Sense strand starting at position 2414 of SEQ ID NO: 1889161
ggguucuuugggugagaga

SEQ ID NO: 2582187 - RNA, 19 nt, Artificial Sequence
  Description of Artificial Sequence: Synthetic oligonucleotide
  Antisense strand to SEQ ID NO: 2582186
ucucucacccaaagaaccc

SEQ ID NO: 2582188 - RNA, 19 nt, Artificial Sequence
  Description of Artificial Sequence: Synthetic oligonucleotide
  Sense strand starting at position 2423 of SEQ ID NO: 1889161
gggugagagaauuauacgu

SEQ ID NO: 2582189 - RNA, 19 nt, Artificial Sequence
  Description of Artificial Sequence: Synthetic oligonucleotide
  Antisense strand to SEQ ID NO: 2582188
acguauaauucucucaccc

SEQ ID NO: 2582190 - RNA, 19 nt, Artificial Sequence
  Description of Artificial Sequence: Synthetic oligonucleotide
  Sense strand starting at position 2428 of SEQ ID NO: 1889161
agagaauuauacgugagac

SEQ ID NO: 2582191 - RNA, 19 nt, Artificial Sequence
  Description of Artificial Sequence: Synthetic oligonucleotide
  Antisense strand to SEQ ID NO: 2582190
gucucacguauaauucucu

SEQ ID NO: 2582192 - RNA, 19 nt, Artificial Sequence
  Description of Artificial Sequence: Synthetic oligonucleotide
  Sense strand starting at position 2447 of SEQ ID NO: 1889161
cccagagaugggugccaau

SEQ ID NO: 2582193 - RNA, 19 nt, Artificial Sequence
  Description of Artificial Sequence: Synthetic oligonucleotide
  Antisense strand to SEQ ID NO: 2582192
auuggcacccaucucuggg

SEQ ID NO: 2582194 - RNA, 19 nt, Artificial Sequence
  Description of Artificial Sequence: Synthetic oligonucleotide
  Sense strand starting at position 2464 of SEQ ID NO: 1889161
augaaagauggcugggcua

SEQ ID NO: 2582195 - RNA, 19 nt, Artificial Sequence
  Description of Artificial Sequence: Synthetic oligonucleotide
  Antisense strand to SEQ ID NO: 2582194
uagcccagccaucuuucau

SEQ ID NO: 2582196 - RNA, 19 nt, Artificial Sequence
  Description of Artificial Sequence: Synthetic oligonucleotide
  Sense strand starting at position 2686 of SEQ ID NO: 1889161
uacuguggauucucuauga

SEQ ID NO: 2582197 - RNA, 19 nt, Artificial Sequence
  Description of Artificial Sequence: Synthetic oligonucleotide
  Antisense strand to SEQ ID NO: 2582196
ucauagagaauccacagua

SEQ ID NO: 2582198 - RNA, 19 nt, Artificial Sequence
  Description of Artificial Sequence: Synthetic oligonucleotide
  Sense strand starting at position 2690 of SEQ ID NO: 1889161
guggauucucuaugaaaga

SEQ ID NO: 2582199 - RNA, 19 nt, Artificial Sequence
  Description of Artificial Sequence: Synthetic oligonucleotide
  Antisense strand to SEQ ID NO: 2582198
ucuuucauagagaauccac

SEQ ID NO: 2582200 - RNA, 19 nt, Artificial Sequence
  Description of Artificial Sequence: Synthetic oligonucleotide
  Sense strand starting at position 2691 of SEQ ID NO: 1889161
uggauucucuaugaaagaa

SEQ ID NO: 2582201 - RNA, 19 nt, Artificial Sequence
  Description of Artificial Sequence: Synthetic oligonucleotide
  Antisense strand to SEQ ID NO: 2582200
uucuuucauagagaaucca

SEQ ID NO: 2582202 - RNA, 19 nt, Artificial Sequence
  Description of Artificial Sequence: Synthetic oligonucleotide
  Sense strand starting at position 2729 of SEQ ID NO: 1889161
cucagagaaugaccuguuu

SEQ ID NO: 2582203 - RNA, 19 nt, Artificial Sequence
  Description of Artificial Sequence: Synthetic oligonucleotide
  Antisense strand to SEQ ID NO: 2582202
aaacaggucauucucugag

SEQ ID NO: 2582204 - RNA, 19 nt, Artificial Sequence
  Description of Artificial Sequence: Synthetic oligonucleotide
  Sense strand starting at position 2906 of SEQ ID NO: 1889161
gccaauagaucugugguga

SEQ ID NO: 2582205 - RNA, 19 nt, Artificial Sequence
  Description of Artificial Sequence: Synthetic oligonucleotide
  Antisense strand to SEQ ID NO: 2582204
ucaccacagaucuauuggc

SEQ ID NO: 2582206 - RNA, 19 nt, Artificial Sequence
  Description of Artificial Sequence: Synthetic oligonucleotide
  Sense strand starting at position 2907 of SEQ ID NO: 1889161
ccaauagaucuguggugag

SEQ ID NO: 2582207 - RNA, 19 nt, Artificial Sequence
  Description of Artificial Sequence: Synthetic oligonucleotide
  Antisense strand to SEQ ID NO: 2582206
cucaccacagaucuauugg

SEQ ID NO: 2582208 - RNA, 19 nt, Artificial Sequence
  Description of Artificial Sequence: Synthetic oligonucleotide
  Sense strand starting at position 2951 of SEQ ID NO: 1889161
agugaaagaccuuguauac

SEQ ID NO: 2582209 - RNA, 19 nt, Artificial Sequence
  Description of Artificial Sequence: Synthetic oligonucleotide
  Antisense strand to SEQ ID NO: 2582208
guauacaaggucuuucacu

SEQ ID NO: 2582210 - RNA, 19 nt, Artificial Sequence
  Description of Artificial Sequence: Synthetic oligonucleotide
  Sense strand starting at position 2983 of SEQ ID NO: 1889161
uugcauaugcaaugaaaca

SEQ ID NO: 2582211 - RNA, 19 nt, Artificial Sequence
  Description of Artificial Sequence: Synthetic oligonucleotide
  Antisense strand to SEQ ID NO: 2582210
uguuucauugcauaugcaa

SEQ ID NO: 2582212 - RNA, 19 nt, Artificial Sequence
  Description of Artificial Sequence: Synthetic oligonucleotide
  Sense strand starting at position 3003 of SEQ ID NO: 1889161
aggcuagauuuccaggcaa

SEQ ID NO: 2582213 - RNA, 19 nt, Artificial Sequence
  Description of Artificial Sequence: Synthetic oligonucleotide
  Antisense strand to SEQ ID NO: 2582212
uugccuggaaaucuagccu

SEQ ID NO: 2582214 - RNA, 19 nt, Artificial Sequence
  Description of Artificial Sequence: Synthetic oligonucleotide
  Sense strand starting at position 3218 of SEQ ID NO: 1889161
cuccaugaacugugaauug

SEQ ID NO: 2582215 - RNA, 19 nt, Artificial Sequence
  Description of Artificial Sequence: Synthetic oligonucleotide
  Antisense strand to SEQ ID NO: 2582214
caauucacaguucauggag

SEQ ID NO: 2582216 - RNA, 19 nt, Artificial Sequence
  Description of Artificial Sequence: Synthetic oligonucleotide
  Sense strand starting at position 3266 of SEQ ID NO: 1889161
aggaaauccuaggccauga

SEQ ID NO: 2582217 - RNA, 19 nt, Artificial Sequence
  Description of Artificial Sequence: Synthetic oligonucleotide
  Antisense strand to SEQ ID NO: 2582216
ucauggccuaggauuuccu

SEQ ID NO: 2582218 - RNA, 19 nt, Artificial Sequence
  Description of Artificial Sequence: Synthetic oligonucleotide
  Sense strand starting at position 3270 of SEQ ID NO: 1889161
aauccuaggccaugaggaa

SEQ ID NO: 2582219 - RNA, 19 nt, Artificial Sequence
  Description of Artificial Sequence: Synthetic oligonucleotide
  Antisense strand to SEQ ID NO: 2582218
uuccucauggccuaggauu

SEQ ID NO: 2582220 - RNA, 19 nt, Artificial Sequence
  Description of Artificial Sequence: Synthetic oligonucleotide
  Sense strand starting at position 3476 of SEQ ID NO: 1889161
ugaacugcuucugcaauua

SEQ ID NO: 2582221 - RNA, 19 nt, Artificial Sequence
  Description of Artificial Sequence: Synthetic oligonucleotide
  Antisense strand to SEQ ID NO: 2582220
uaauugcagaagcaguuca

SEQ ID NO: 2582222 - RNA, 19 nt, Artificial Sequence
  Description of Artificial Sequence: Synthetic oligonucleotide
  Sense strand starting at position 3529 of SEQ ID NO: 1889161
gcgucaucagucuucacgu

SEQ ID NO: 2582223 - RNA, 19 nt, Artificial Sequence
  Description of Artificial Sequence: Synthetic oligonucleotide
  Antisense strand to SEQ ID NO: 2582222
acgugaagacugaugacgc

SEQ ID NO: 2582224 - RNA, 19 nt, Artificial Sequence
  Description of Artificial Sequence: Synthetic oligonucleotide
  Sense strand starting at position 3633 of SEQ ID NO: 1889161
cucucuguccuagaaugaa

SEQ ID NO: 2582225 - RNA, 19 nt, Artificial Sequence
  Description of Artificial Sequence: Synthetic oligonucleotide
  Antisense strand to SEQ ID NO: 2582224
uucauucuaggacagagag

SEQ ID NO: 2582226 - RNA, 19 nt, Artificial Sequence
  Description of Artificial Sequence: Synthetic oligonucleotide
  Sense strand starting at position 3636 of SEQ ID NO: 1889161
ucuguccuagaaugaaauc

SEQ ID NO: 2582227 - RNA, 19 nt, Artificial Sequence
  Description of Artificial Sequence: Synthetic oligonucleotide
  Antisense strand to SEQ ID NO: 2582226
gauuucauucuaggacaga

SEQ ID NO: 2582228 - RNA, 19 nt, Artificial Sequence
  Description of Artificial Sequence: Synthetic oligonucleotide
  Sense strand starting at position 3937 of SEQ ID NO: 1889161
ggaaguguugccgugcguu

SEQ ID NO: 2582229 - RNA, 19 nt, Artificial Sequence
  Description of Artificial Sequence: Synthetic oligonucleotide
  Antisense strand to SEQ ID NO: 2582228
aacgcacggcaacacuucc

SEQ ID NO: 2582230 - RNA, 19 nt, Artificial Sequence
  Description of Artificial Sequence: Synthetic oligonucleotide
  Sense strand starting at position 3939 of SEQ ID NO: 1889161
aaguguugccgugcguuau

SEQ ID NO: 2582231 - RNA, 19 nt, Artificial Sequence
  Description of Artificial Sequence: Synthetic oligonucleotide
  Antisense strand to SEQ ID NO: 2582230
auaacgcacggcaacacuu

SEQ ID NO: 2582232 - RNA, 19 nt, Artificial Sequence
  Description of Artificial Sequence: Synthetic oligonucleotide
  Sense strand starting at position 111 of SEQ ID NO: 1889162
uuugauugaacgggaaacu

SEQ ID NO: 2582233 - RNA, 19 nt, Artificial Sequence
  Description of Artificial Sequence: Synthetic oligonucleotide
  Antisense strand to SEQ ID NO: 2582232
aguuucccguucaaucaaa

SEQ ID NO: 2582234 - RNA, 19 nt, Artificial Sequence
  Description of Artificial Sequence: Synthetic oligonucleotide
  Sense strand starting at position 120 of SEQ ID NO: 1889162
acgggaaacugaguaguuu

SEQ ID NO: 2582235 - RNA, 19 nt, Artificial Sequence
  Description of Artificial Sequence: Synthetic oligonucleotide
  Antisense strand to SEQ ID NO: 2582234
aaacuacucaguuucccgu

SEQ ID NO: 2582236 - RNA, 19 nt, Artificial Sequence
  Description of Artificial Sequence: Synthetic oligonucleotide
  Sense strand starting at position 164 of SEQ ID NO: 1889162
uaggccauugcugaugaaa

SEQ ID NO: 2582237 - RNA, 19 nt, Artificial Sequence
  Description of Artificial Sequence: Synthetic oligonucleotide
  Antisense strand to SEQ ID NO: 2582236
uuucaucagcaauggccua

SEQ ID NO: 2582238 - RNA, 19 nt, Artificial Sequence
  Description of Artificial Sequence: Synthetic oligonucleotide
  Sense strand starting at position 166 of SEQ ID NO: 1889162
ggccauugcugaugaaaca

SEQ ID NO: 2582239 - RNA, 19 nt, Artificial Sequence
  Description of Artificial Sequence: Synthetic oligonucleotide
  Antisense strand to SEQ ID NO: 2582238
uguuucaucagcaauggcc

SEQ ID NO: 2582240 - RNA, 19 nt, Artificial Sequence
  Description of Artificial Sequence: Synthetic oligonucleotide
  Sense strand starting at position 213 of SEQ ID NO: 1889162
gcccauaaauagguaguua

SEQ ID NO: 2582241 - RNA, 19 nt, Artificial Sequence
  Description of Artificial Sequence: Synthetic oligonucleotide
  Antisense strand to SEQ ID NO: 2582240
uaacuaccuauuuaugggc

SEQ ID NO: 2582242 - RNA, 19 nt, Artificial Sequence
  Description of Artificial Sequence: Synthetic oligonucleotide
  Sense strand starting at position 276 of SEQ ID NO: 1889162
acuacugucugucaccuaa

SEQ ID NO: 2582243 - RNA, 19 nt, Artificial Sequence
  Description of Artificial Sequence: Synthetic oligonucleotide
  Antisense strand to SEQ ID NO: 2582242
uuaggugacagacaguagu

SEQ ID NO: 2582244 - RNA, 19 nt, Artificial Sequence
  Description of Artificial Sequence: Synthetic oligonucleotide
  Sense strand starting at position 512 of SEQ ID NO: 1889162
gaggccauguccuucuauu

SEQ ID NO: 2582245 - RNA, 19 nt, Artificial Sequence
  Description of Artificial Sequence: Synthetic oligonucleotide
  Antisense strand to SEQ ID NO: 2582244
aauagaaggacauggccuc

SEQ ID NO: 2582246 - RNA, 19 nt, Artificial Sequence
  Description of Artificial Sequence: Synthetic oligonucleotide
  Sense strand starting at position 628 of SEQ ID NO: 1889162
auggaucagucagcaguuu

SEQ ID NO: 2582247 - RNA, 19 nt, Artificial Sequence
  Description of Artificial Sequence: Synthetic oligonucleotide
  Antisense strand to SEQ ID NO: 2582246
aaacugcugacugauccau

SEQ ID NO: 2582248 - RNA, 19 nt, Artificial Sequence
  Description of Artificial Sequence: Synthetic oligonucleotide
  Sense strand starting at position 1207 of SEQ ID NO: 1889162
ggagcuggcgaaugauaau

SEQ ID NO: 2582249 - RNA, 19 nt, Artificial Sequence
  Description of Artificial Sequence: Synthetic oligonucleotide
  Antisense strand to SEQ ID NO: 2582248
auuaucauucgccagcucc

SEQ ID NO: 2582250 - RNA, 19 nt, Artificial Sequence
  Description of Artificial Sequence: Synthetic oligonucleotide
  Sense strand starting at position 1213 of SEQ ID NO: 1889162
ggcgaaugauaaugagaca

SEQ ID NO: 2582251 - RNA, 19 nt, Artificial Sequence
  Description of Artificial Sequence: Synthetic oligonucleotide
  Antisense strand to SEQ ID NO: 2582250
ugucucauuaucauucgcc

SEQ ID NO: 2582252 - RNA, 19 nt, Artificial Sequence
  Description of Artificial Sequence: Synthetic oligonucleotide
  Sense strand starting at position 1225 of SEQ ID NO: 1889162
ugagacagcuaucccuuua

SEQ ID NO: 2582253 - RNA, 19 nt, Artificial Sequence
  Description of Artificial Sequence: Synthetic oligonucleotide
  Antisense strand to SEQ ID NO: 2582252
uaaagggauagcugucuca

SEQ ID NO: 2582254 - RNA, 19 nt, Artificial Sequence
  Description of Artificial Sequence: Synthetic oligonucleotide
  Sense strand starting at position 1306 of SEQ ID NO: 1889162
ucgugaaauguggguguua

SEQ ID NO: 2582255 - RNA, 19 nt, Artificial Sequence
  Description of Artificial Sequence: Synthetic oligonucleotide
  Antisense strand to SEQ ID NO: 2582254
uaacacccacauuucacga

SEQ ID NO: 2582256 - RNA, 19 nt, Artificial Sequence
  Description of Artificial Sequence: Synthetic oligonucleotide
  Sense strand starting at position 1307 of SEQ ID NO: 1889162
cgugaaauguggguguuac

SEQ ID NO: 2582257 - RNA, 19 nt, Artificial Sequence
  Description of Artificial Sequence: Synthetic oligonucleotide
  Antisense strand to SEQ ID NO: 2582256
guaacacccacauuucacg

SEQ ID NO: 2582258 - RNA, 19 nt, Artificial Sequence
  Description of Artificial Sequence: Synthetic oligonucleotide
  Sense strand starting at position 1308 of SEQ ID NO: 1889162
gugaaauguggguguuaca

SEQ ID NO: 2582259 - RNA, 19 nt, Artificial Sequence
  Description of Artificial Sequence: Synthetic oligonucleotide
  Antisense strand to SEQ ID NO: 2582258
uguaacacccacauuucac

SEQ ID NO: 2582260 - RNA, 19 nt, Artificial Sequence
  Description of Artificial Sequence: Synthetic oligonucleotide
  Sense strand starting at position 1356 of SEQ ID NO: 1889162
cauggauugucugggauug

SEQ ID NO: 2582261 - RNA, 19 nt, Artificial Sequence
  Description of Artificial Sequence: Synthetic oligonucleotide
  Antisense strand to SEQ ID NO: 2582260
caaucccagacaauccaug

SEQ ID NO: 2582262 - RNA, 19 nt, Artificial Sequence
  Description of Artificial Sequence: Synthetic oligonucleotide
  Sense strand starting at position 1358 of SEQ ID NO: 1889162
uggauugucugggauugcu

SEQ ID NO: 2582263 - RNA, 19 nt, Artificial Sequence
  Description of Artificial Sequence: Synthetic oligonucleotide
  Antisense strand to SEQ ID NO: 2582262
agcaaucccagacaaucca

SEQ ID NO: 2582264 - RNA, 19 nt, Artificial Sequence
  Description of Artificial Sequence: Synthetic oligonucleotide
  Sense strand starting at position 1553 of SEQ ID NO: 1889162
ggcccuggcucaugaucua

SEQ ID NO: 2582265 - RNA, 19 nt, Artificial Sequence
  Description of Artificial Sequence: Synthetic oligonucleotide
  Antisense strand to SEQ ID NO: 2582264
uagaucaugagccagggcc

SEQ ID NO: 2582266 - RNA, 19 nt, Artificial Sequence
  Description of Artificial Sequence: Synthetic oligonucleotide
  Sense strand starting at position 1773 of SEQ ID NO: 1889162
aggcuuaaccuucgugaac

SEQ ID NO: 2582267 - RNA, 19 nt, Artificial Sequence
  Description of Artificial Sequence: Synthetic oligonucleotide
  Antisense strand to SEQ ID NO: 2582266
guucacgaagguuaagccu

SEQ ID NO: 2582268 - RNA, 19 nt, Artificial Sequence
  Description of Artificial Sequence: Synthetic oligonucleotide
  Sense strand starting at position 2103 of SEQ ID NO: 1889162
uguagugagccaugaguuu

SEQ ID NO: 2582269 - RNA, 19 nt, Artificial Sequence
  Description of Artificial Sequence: Synthetic oligonucleotide
  Antisense strand to SEQ ID NO: 2582268
aaacucauggcucacuaca

SEQ ID NO: 2582270 - RNA, 19 nt, Artificial Sequence
  Description of Artificial Sequence: Synthetic oligonucleotide
  Sense strand starting at position 22 of SEQ ID NO: 1889163
uucuaaguauaucccgauu

SEQ ID NO: 2582271 - RNA, 19 nt, Artificial Sequence
  Description of Artificial Sequence: Synthetic oligonucleotide
  Antisense strand to SEQ ID NO: 2582270
aaucgggauauacuuagaa

SEQ ID NO: 2582272 - RNA, 19 nt, Artificial Sequence
  Description of Artificial Sequence: Synthetic oligonucleotide
  Sense strand starting at position 25 of SEQ ID NO: 1889163
uaaguauaucccgauuguu

SEQ ID NO: 2582273 - RNA, 19 nt, Artificial Sequence
  Description of Artificial Sequence: Synthetic oligonucleotide
  Antisense strand to SEQ ID NO: 2582272
aacaaucgggauauacuua

SEQ ID NO: 2582274 - RNA, 19 nt, Artificial Sequence
  Description of Artificial Sequence: Synthetic oligonucleotide
  Sense strand starting at position 330 of SEQ ID NO: 1889163
agugaauugggaggcaagu

SEQ ID NO: 2582275 - RNA, 19 nt, Artificial Sequence
  Description of Artificial Sequence: Synthetic oligonucleotide
  Antisense strand to SEQ ID NO: 2582274
acuugccucccaauucacu

SEQ ID NO: 2582276 - RNA, 19 nt, Artificial Sequence
  Description of Artificial Sequence: Synthetic oligonucleotide
  Sense strand starting at position 619 of SEQ ID NO: 1889163
ucagguaguguugaggaua

SEQ ID NO: 2582277 - RNA, 19 nt, Artificial Sequence
  Description of Artificial Sequence: Synthetic oligonucleotide
  Antisense strand to SEQ ID NO: 2582276
uauccucaacacuaccuga

SEQ ID NO: 2582278 - RNA, 19 nt, Artificial Sequence
  Description of Artificial Sequence: Synthetic oligonucleotide
  Sense strand starting at position 622 of SEQ ID NO: 1889163
gguaguguugaggauauaa

SEQ ID NO: 2582279 - RNA, 19 nt, Artificial Sequence
  Description of Artificial Sequence: Synthetic oligonucleotide
  Antisense strand to SEQ ID NO: 2582278
uuauauccucaacacuacc

SEQ ID NO: 2582280 - RNA, 19 nt, Artificial Sequence
  Description of Artificial Sequence: Synthetic oligonucleotide
  Sense strand starting at position 635 of SEQ ID NO: 1889163
auauaaucuggugagcagu

SEQ ID NO: 2582281 - RNA, 19 nt, Artificial Sequence
  Description of Artificial Sequence: Synthetic oligonucleotide
  Antisense strand to SEQ ID NO: 2582280
acugcucaccagauuauau

SEQ ID NO: 2582282 - RNA, 19 nt, Artificial Sequence
  Description of Artificial Sequence: Synthetic oligonucleotide
  Sense strand starting at position 864 of SEQ ID NO: 1889163
guauguggccuauacacuu

SEQ ID NO: 2582283 - RNA, 19 nt, Artificial Sequence
  Description of Artificial Sequence: Synthetic oligonucleotide
  Antisense strand to SEQ ID NO: 2582282
aaguguauaggccacauac

SEQ ID NO: 2582284 - RNA, 19 nt, Artificial Sequence
  Description of Artificial Sequence: Synthetic oligonucleotide
  Sense strand starting at position 989 of SEQ ID NO: 1889163
auggaaauccauugcauga

SEQ ID NO: 2582285 - RNA, 19 nt, Artificial Sequence
  Description of Artificial Sequence: Synthetic oligonucleotide
  Antisense strand to SEQ ID NO: 2582284
ucaugcaauggauuuccau

SEQ ID NO: 2582286 - RNA, 19 nt, Artificial Sequence
  Description of Artificial Sequence: Synthetic oligonucleotide
  Sense strand starting at position 1165 of SEQ ID NO: 1889163
ucugcauuugccugguaaa

SEQ ID NO: 2582287 - RNA, 19 nt, Artificial Sequence
  Description of Artificial Sequence: Synthetic oligonucleotide
  Antisense strand to SEQ ID NO: 2582286
uuuaccaggcaaaugcaga

SEQ ID NO: 2582288 - RNA, 19 nt, Artificial Sequence
  Description of Artificial Sequence: Synthetic oligonucleotide
  Sense strand starting at position 1166 of SEQ ID NO: 1889163
cugcauuugccugguaaac

SEQ ID NO: 2582289 - RNA, 19 nt, Artificial Sequence
  Description of Artificial Sequence: Synthetic oligonucleotide
  Antisense strand to SEQ ID NO: 2582288
guuuaccaggcaaaugcag

SEQ ID NO: 2582290 - RNA, 19 nt, Artificial Sequence
  Description of Artificial Sequence: Synthetic oligonucleotide
  Sense strand starting at position 1557 of SEQ ID NO: 1889163
acagacgaccucugauaca

SEQ ID NO: 2582291 - RNA, 19 nt, Artificial Sequence
  Description of Artificial Sequence: Synthetic oligonucleotide
  Antisense strand to SEQ ID NO: 2582290
uguaucagaggucgucugu

SEQ ID NO: 2582292 - RNA, 19 nt, Artificial Sequence
  Description of Artificial Sequence: Synthetic oligonucleotide
  Sense strand starting at position 1751 of SEQ ID NO: 1889163
uuaggucucagugaugauu

SEQ ID NO: 2582293 - RNA, 19 nt, Artificial Sequence
  Description of Artificial Sequence: Synthetic oligonucleotide
  Antisense strand to SEQ ID NO: 2582292
aaucaucacugagaccuaa

SEQ ID NO: 2582294 - RNA, 19 nt, Artificial Sequence
  Description of Artificial Sequence: Synthetic oligonucleotide
  Sense strand starting at position 2042 of SEQ ID NO: 1889163
cugcuuagucaggaugaca

SEQ ID NO: 2582295 - RNA, 19 nt, Artificial Sequence
  Description of Artificial Sequence: Synthetic oligonucleotide
  Antisense strand to SEQ ID NO: 2582294
ugucauccugacuaagcag

SEQ ID NO: 2582296 - RNA, 19 nt, Artificial Sequence
  Description of Artificial Sequence: Synthetic oligonucleotide
  Sense strand starting at position 2053 of SEQ ID NO: 1889163
ggaugacagcccugagagu

SEQ ID NO: 2582297 - RNA, 19 nt, Artificial Sequence
  Description of Artificial Sequence: Synthetic oligonucleotide
  Antisense strand to SEQ ID NO: 2582296
acucucagggcugucaucc

SEQ ID NO: 2582298 - RNA, 19 nt, Artificial Sequence
  Description of Artificial Sequence: Synthetic oligonucleotide
  Sense strand starting at position 2054 of SEQ ID NO: 1889163
gaugacagcccugagaguu

SEQ ID NO: 2582299 - RNA, 19 nt, Artificial Sequence
  Description of Artificial Sequence: Synthetic oligonucleotide
  Antisense strand to SEQ ID NO: 2582298
aacucucagggcugucauc

SEQ ID NO: 2582300 - RNA, 19 nt, Artificial Sequence
  Description of Artificial Sequence: Synthetic oligonucleotide
  Sense strand starting at position 2064 of SEQ ID NO: 1889163
cugagaguugguuaccuga

SEQ ID NO: 2582301 - RNA, 19 nt, Artificial Sequence
  Description of Artificial Sequence: Synthetic oligonucleotide
  Antisense strand to SEQ ID NO: 2582300
ucagguaaccaacucucag

SEQ ID NO: 2582302 - RNA, 19 nt, Artificial Sequence
  Description of Artificial Sequence: Synthetic oligonucleotide
  Sense strand starting at position 2185 of SEQ ID NO: 1889163
cguggcuugccagagaaga

SEQ ID NO: 2582303 - RNA, 19 nt, Artificial Sequence
  Description of Artificial Sequence: Synthetic oligonucleotide
  Antisense strand to SEQ ID NO: 2582302
ucuucucuggcaagccacg

SEQ ID NO: 2582304 - RNA, 19 nt, Artificial Sequence
  Description of Artificial Sequence: Synthetic oligonucleotide
  Sense strand starting at position 2201 of SEQ ID NO: 1889163
agaagaccucuauguaguu

SEQ ID NO: 2582305 - RNA, 19 nt, Artificial Sequence
  Description of Artificial Sequence: Synthetic oligonucleotide
  Antisense strand to SEQ ID NO: 2582304
aacuacauagaggucuucu

SEQ ID NO: 2582306 - RNA, 19 nt, Artificial Sequence
  Description of Artificial Sequence: Synthetic oligonucleotide
  Sense strand starting at position 2263 of SEQ ID NO: 1889163
uggauagucucauuacccu

SEQ ID NO: 2582307 - RNA, 19 nt, Artificial Sequence
  Description of Artificial Sequence: Synthetic oligonucleotide
  Antisense strand to SEQ ID NO: 2582306
aggguaaugagacuaucca

SEQ ID NO: 2582308 - RNA, 19 nt, Artificial Sequence
  Description of Artificial Sequence: Synthetic oligonucleotide
  Sense strand starting at position 2269 of SEQ ID NO: 1889163
gucucauuacccuaggaua

SEQ ID NO: 2582309 - RNA, 19 nt, Artificial Sequence
  Description of Artificial Sequence: Synthetic oligonucleotide
  Antisense strand to SEQ ID NO: 2582308
uauccuaggguaaugagac

SEQ ID NO: 2582310 - RNA, 19 nt, Artificial Sequence
  Description of Artificial Sequence: Synthetic oligonucleotide
  Sense strand starting at position 2643 of SEQ ID NO: 1889163
aaauaauguggcugacaca

SEQ ID NO: 2582311 - RNA, 19 nt, Artificial Sequence
  Description of Artificial Sequence: Synthetic oligonucleotide
  Antisense strand to SEQ ID NO: 2582310
ugugucagccacauuauuu

SEQ ID NO: 2582312 - RNA, 19 nt, Artificial Sequence
  Description of Artificial Sequence: Synthetic oligonucleotide
  Sense strand starting at position 2736 of SEQ ID NO: 1889163
gucccuguguucuuuauuu

SEQ ID NO: 2582313 - RNA, 19 nt, Artificial Sequence
  Description of Artificial Sequence: Synthetic oligonucleotide
  Antisense strand to SEQ ID NO: 2582312
aaauaaagaacacagggac

SEQ ID NO: 2582314 - RNA, 19 nt, Artificial Sequence
  Description of Artificial Sequence: Synthetic oligonucleotide
  Sense strand starting at position 2762 of SEQ ID NO: 1889163
gaucauaaauccgcaguca

SEQ ID NO: 2582315 - RNA, 19 nt, Artificial Sequence
  Description of Artificial Sequence: Synthetic oligonucleotide
  Antisense strand to SEQ ID NO: 2582314
ugacugcggauuuaugauc

SEQ ID NO: 2582316 - RNA, 19 nt, Artificial Sequence
  Description of Artificial Sequence: Synthetic oligonucleotide
  Sense strand starting at position 2763 of SEQ ID NO: 1889163
aucauaaauccgcagucaa

SEQ ID NO: 2582317 - RNA, 19 nt, Artificial Sequence
  Description of Artificial Sequence: Synthetic oligonucleotide
  Antisense strand to SEQ ID NO: 2582316
uugacugcggauuuaugau

SEQ ID NO: 2582318 - RNA, 19 nt, Artificial Sequence
  Description of Artificial Sequence: Synthetic oligonucleotide
  Sense strand starting at position 2796 of SEQ ID NO: 1889163
gagagaugucuguguccaa

SEQ ID NO: 2582319 - RNA, 19 nt, Artificial Sequence
  Description of Artificial Sequence: Synthetic oligonucleotide
  Antisense strand to SEQ ID NO: 2582318
uuggacacagacaucucuc

SEQ ID NO: 2582320 - RNA, 19 nt, Artificial Sequence
  Description of Artificial Sequence: Synthetic oligonucleotide
  Sense strand starting at position 2797 of SEQ ID NO: 1889163
agagaugucuguguccaag

SEQ ID NO: 2582321 - RNA, 19 nt, Artificial Sequence
  Description of Artificial Sequence: Synthetic oligonucleotide
  Antisense strand to SEQ ID NO: 2582320
cuuggacacagacaucucu

SEQ ID NO: 2582322 - RNA, 19 nt, Artificial Sequence
  Description of Artificial Sequence: Synthetic oligonucleotide
  Sense strand starting at position 2815 of SEQ ID NO: 1889163
gucaucucuccguaccaaa

SEQ ID NO: 2582323 - RNA, 19 nt, Artificial Sequence
  Description of Artificial Sequence: Synthetic oligonucleotide
  Antisense strand to SEQ ID NO: 2582322
uuugguacggagagaugac

SEQ ID NO: 2582324 - RNA, 19 nt, Artificial Sequence
  Description of Artificial Sequence: Synthetic oligonucleotide
  Sense strand starting at position 2879 of SEQ ID NO: 1889163
ugagauauugcccaguguu

SEQ ID NO: 2582325 - RNA, 19 nt, Artificial Sequence
  Description of Artificial Sequence: Synthetic oligonucleotide
  Antisense strand to SEQ ID NO: 2582324
aacacugggcaauaucuca

SEQ ID NO: 2582326 - RNA, 19 nt, Artificial Sequence
  Description of Artificial Sequence: Synthetic oligonucleotide
  Sense strand starting at position 3089 of SEQ ID NO: 1889163
gauacaaucuggucagggu

SEQ ID NO: 2582327 - RNA, 19 nt, Artificial Sequence
  Description of Artificial Sequence: Synthetic oligonucleotide
  Antisense strand to SEQ ID NO: 2582326
acccugaccagauuguauc

SEQ ID NO: 2582328 - RNA, 19 nt, Artificial Sequence
  Description of Artificial Sequence: Synthetic oligonucleotide
  Sense strand starting at position 3150 of SEQ ID NO: 1889163
ggugacacagaauguguuu

SEQ ID NO: 2582329 - RNA, 19 nt, Artificial Sequence
  Description of Artificial Sequence: Synthetic oligonucleotide
  Antisense strand to SEQ ID NO: 2582328
aaacacauucugugucacc

SEQ ID NO: 2582330 - RNA, 19 nt, Artificial Sequence
  Description of Artificial Sequence: Synthetic oligonucleotide
  Sense strand starting at position 3221 of SEQ ID NO: 1889163
cgguguucaagugagagua

SEQ ID NO: 2582331 - RNA, 19 nt, Artificial Sequence
  Description of Artificial Sequence: Synthetic oligonucleotide
  Antisense strand to SEQ ID NO: 2582330
uacucucacuugaacaccg

SEQ ID NO: 2582332 - RNA, 19 nt, Artificial Sequence
  Description of Artificial Sequence: Synthetic oligonucleotide
  Sense strand starting at position 3229 of SEQ ID NO: 1889163
aagugagaguacuccaaug

SEQ ID NO: 2582333 - RNA, 19 nt, Artificial Sequence
  Description of Artificial Sequence: Synthetic oligonucleotide
  Antisense strand to SEQ ID NO: 2582332
cauuggaguacucucacuu

SEQ ID NO: 2582334 - RNA, 19 nt, Artificial Sequence
  Description of Artificial Sequence: Synthetic oligonucleotide
  Sense strand starting at position 3320 of SEQ ID NO: 1889163
gccaaaugggaguggaauu

SEQ ID NO: 2582335 - RNA, 19 nt, Artificial Sequence
  Description of Artificial Sequence: Synthetic oligonucleotide
  Antisense strand to SEQ ID NO: 2582334
aauuccacucccauuuggc

SEQ ID NO: 2582336 - RNA, 19 nt, Artificial Sequence
  Description of Artificial Sequence: Synthetic oligonucleotide
  Sense strand starting at position 3480 of SEQ ID NO: 1889163
augggaauccauugcauaa

SEQ ID NO: 2582337 - RNA, 19 nt, Artificial Sequence
  Description of Artificial Sequence: Synthetic oligonucleotide
  Antisense strand to SEQ ID NO: 2582336
uuaugcaauggauucccau

SEQ ID NO: 2582338 - RNA, 19 nt, Artificial Sequence
  Description of Artificial Sequence: Synthetic oligonucleotide
  Sense strand starting at position 3495 of SEQ ID NO: 1889163
auaaguguuuccuucuaaa

SEQ ID NO: 2582339 - RNA, 19 nt, Artificial Sequence
  Description of Artificial Sequence: Synthetic oligonucleotide
  Antisense strand to SEQ ID NO: 2582338
uuuagaaggaaacacuuau

SEQ ID NO: 2582340 - RNA, 19 nt, Artificial Sequence
  Description of Artificial Sequence: Synthetic oligonucleotide
  Sense strand starting at position 3617 of SEQ ID NO: 1889163
gcauaauuccuguaggaug

SEQ ID NO: 2582341 - RNA, 19 nt, Artificial Sequence
  Description of Artificial Sequence: Synthetic oligonucleotide
  Antisense strand to SEQ ID NO: 2582340
cauccuacaggaauuaugc

SEQ ID NO: 2582342 - RNA, 19 nt, Artificial Sequence
  Description of Artificial Sequence: Synthetic oligonucleotide
  Sense strand starting at position 3695 of SEQ ID NO: 1889163
acgggcuucucaucaugga

SEQ ID NO: 2582343 - RNA, 19 nt, Artificial Sequence
  Description of Artificial Sequence: Synthetic oligonucleotide
  Antisense strand to SEQ ID NO: 2582342
uccaugaugagaagcccgu

SEQ ID NO: 2582344 - RNA, 19 nt, Artificial Sequence
  Description of Artificial Sequence: Synthetic oligonucleotide
  Sense strand starting at position 3696 of SEQ ID NO: 1889163
cgggcuucucaucauggaa

SEQ ID NO: 2582345 - RNA, 19 nt, Artificial Sequence
  Description of Artificial Sequence: Synthetic oligonucleotide
  Antisense strand to SEQ ID NO: 2582344
uuccaugaugagaagcccg

SEQ ID NO: 2582346 - RNA, 19 nt, Artificial Sequence
  Description of Artificial Sequence: Synthetic oligonucleotide
  Sense strand starting at position 3728 of SEQ ID NO: 1889163
aggcuauugcuagaugaga

SEQ ID NO: 2582347 - RNA, 19 nt, Artificial Sequence
  Description of Artificial Sequence: Synthetic oligonucleotide
  Antisense strand to SEQ ID NO: 2582346
ucucaucuagcaauagccu

SEQ ID NO: 2582348 - RNA, 19 nt, Artificial Sequence
  Description of Artificial Sequence: Synthetic oligonucleotide
  Sense strand starting at position 3730 of SEQ ID NO: 1889163
gcuauugcuagaugagacu

SEQ ID NO: 2582349 - RNA, 19 nt, Artificial Sequence
  Description of Artificial Sequence: Synthetic oligonucleotide
  Antisense strand to SEQ ID NO: 2582348
agucucaucuagcaauagc

SEQ ID NO: 2582350 - RNA, 19 nt, Artificial Sequence
  Description of Artificial Sequence: Synthetic oligonucleotide
  Sense strand starting at position 24 of SEQ ID NO: 1889164
uaaguauaucccgauuguu

SEQ ID NO: 2582351 - RNA, 19 nt, Artificial Sequence
  Description of Artificial Sequence: Synthetic oligonucleotide
  Antisense strand to SEQ ID NO: 2582350
aacaaucgggauauacuua

SEQ ID NO: 2582352 - RNA, 19 nt, Artificial Sequence
  Description of Artificial Sequence: Synthetic oligonucleotide
  Sense strand starting at position 329 of SEQ ID NO: 1889164
agugaauugggaggcaagu

SEQ ID NO: 2582353 - RNA, 19 nt, Artificial Sequence
  Description of Artificial Sequence: Synthetic oligonucleotide
  Antisense strand to SEQ ID NO: 2582352
acuugccucccaauucacu

SEQ ID NO: 2582354 - RNA, 19 nt, Artificial Sequence
  Description of Artificial Sequence: Synthetic oligonucleotide
  Sense strand starting at position 618 of SEQ ID NO: 1889164
ucagguaguguugaggaua

SEQ ID NO: 2582355 - RNA, 19 nt, Artificial Sequence
  Description of Artificial Sequence: Synthetic oligonucleotide
  Antisense strand to SEQ ID NO: 2582354
uauccucaacacuaccuga

SEQ ID NO: 2582356 - RNA, 19 nt, Artificial Sequence
  Description of Artificial Sequence: Synthetic oligonucleotide
  Sense strand starting at position 621 of SEQ ID NO: 1889164
gguaguguugaggauauaa

SEQ ID NO: 2582357 - RNA, 19 nt, Artificial Sequence
  Description of Artificial Sequence: Synthetic oligonucleotide
  Antisense strand to SEQ ID NO: 2582356
uuauauccucaacacuacc

SEQ ID NO: 2582358 - RNA, 19 nt, Artificial Sequence
  Description of Artificial Sequence: Synthetic oligonucleotide
  Sense strand starting at position 634 of SEQ ID NO: 1889164
auauaaucuggugagcagu

SEQ ID NO: 2582359 - RNA, 19 nt, Artificial Sequence
  Description of Artificial Sequence: Synthetic oligonucleotide
  Antisense strand to SEQ ID NO: 2582358
acugcucaccagauuauau

SEQ ID NO: 2582360 - RNA, 19 nt, Artificial Sequence
  Description of Artificial Sequence: Synthetic oligonucleotide
  Sense strand starting at position 1003 of SEQ ID NO: 1889164
augaguguuucuuucuaaa

SEQ ID NO: 2582361 - RNA, 19 nt, Artificial Sequence
  Description of Artificial Sequence: Synthetic oligonucleotide
  Antisense strand to SEQ ID NO: 2582360
uuuagaaagaaacacucau

SEQ ID NO: 2582362 - RNA, 19 nt, Artificial Sequence
  Description of Artificial Sequence: Synthetic oligonucleotide
  Sense strand starting at position 1164 of SEQ ID NO: 1889164
ucugcauuugccugguaaa

SEQ ID NO: 2582363 - RNA, 19 nt, Artificial Sequence
  Description of Artificial Sequence: Synthetic oligonucleotide
  Antisense strand to SEQ ID NO: 2582362
uuuaccaggcaaaugcaga

SEQ ID NO: 2582364 - RNA, 19 nt, Artificial Sequence
  Description of Artificial Sequence: Synthetic oligonucleotide
  Sense strand starting at position 1165 of SEQ ID NO: 1889164
cugcauuugccugguaaac

SEQ ID NO: 2582365 - RNA, 19 nt, Artificial Sequence
  Description of Artificial Sequence: Synthetic oligonucleotide
  Antisense strand to SEQ ID NO: 2582364
guuuaccaggcaaaugcag

SEQ ID NO: 2582366 - RNA, 19 nt, Artificial Sequence
  Description of Artificial Sequence: Synthetic oligonucleotide
  Sense strand starting at position 1556 of SEQ ID NO: 1889164
acagacgaccucugauaca

SEQ ID NO: 2582367 - RNA, 19 nt, Artificial Sequence
  Description of Artificial Sequence: Synthetic oligonucleotide
  Antisense strand to SEQ ID NO: 2582366
uguaucagaggucgucugu

SEQ ID NO: 2582368 - RNA, 19 nt, Artificial Sequence
  Description of Artificial Sequence: Synthetic oligonucleotide
  Sense strand starting at position 1607 of SEQ ID NO: 1889164
caguuugaagugugagaac

SEQ ID NO: 2582369 - RNA, 19 nt, Artificial Sequence
  Description of Artificial Sequence: Synthetic oligonucleotide
  Antisense strand to SEQ ID NO: 2582368
guucucacacuucaaacug

SEQ ID NO: 2582370 - RNA, 19 nt, Artificial Sequence
  Description of Artificial Sequence: Synthetic oligonucleotide
  Sense strand starting at position 1750 of SEQ ID NO: 1889164
uuaggucucagugaugauu

SEQ ID NO: 2582371 - RNA, 19 nt, Artificial Sequence
  Description of Artificial Sequence: Synthetic oligonucleotide
  Antisense strand to SEQ ID NO: 2582370
aaucaucacugagaccuaa

SEQ ID NO: 2582372 - RNA, 19 nt, Artificial Sequence
  Description of Artificial Sequence: Synthetic oligonucleotide
  Sense strand starting at position 1797 of SEQ ID NO: 1889164
accagaugguauuccaauc

SEQ ID NO: 2582373 - RNA, 19 nt, Artificial Sequence
  Description of Artificial Sequence: Synthetic oligonucleotide
  Antisense strand to SEQ ID NO: 2582372
gauuggaauaccaucuggu

SEQ ID NO: 2582374 - RNA, 19 nt, Artificial Sequence
  Description of Artificial Sequence: Synthetic oligonucleotide
  Sense strand starting at position 2041 of SEQ ID NO: 1889164
cugcuuagucaggaugaca

SEQ ID NO: 2582375 - RNA, 19 nt, Artificial Sequence
  Description of Artificial Sequence: Synthetic oligonucleotide
  Antisense strand to SEQ ID NO: 2582374
ugucauccugacuaagcag

SEQ ID NO: 2582376 - RNA, 19 nt, Artificial Sequence
  Description of Artificial Sequence: Synthetic oligonucleotide
  Sense strand starting at position 2052 of SEQ ID NO: 1889164
ggaugacagcccugagagu

SEQ ID NO: 2582377 - RNA, 19 nt, Artificial Sequence
  Description of Artificial Sequence: Synthetic oligonucleotide
  Antisense strand to SEQ ID NO: 2582376
acucucagggcugucaucc

SEQ ID NO: 2582378 - RNA, 19 nt, Artificial Sequence
  Description of Artificial Sequence: Synthetic oligonucleotide
  Sense strand starting at position 2053 of SEQ ID NO: 1889164
gaugacagcccugagaguu

SEQ ID NO: 2582379 - RNA, 19 nt, Artificial Sequence
  Description of Artificial Sequence: Synthetic oligonucleotide
  Antisense strand to SEQ ID NO: 2582378
aacucucagggcugucauc

SEQ ID NO: 2582380 - RNA, 19 nt, Artificial Sequence
  Description of Artificial Sequence: Synthetic oligonucleotide
  Sense strand starting at position 2063 of SEQ ID NO: 1889164
cugagaguugguuaccuga

SEQ ID NO: 2582381 - RNA, 19 nt, Artificial Sequence
  Description of Artificial Sequence: Synthetic oligonucleotide
  Antisense strand to SEQ ID NO: 2582380
ucagguaaccaacucucag

SEQ ID NO: 2582382 - RNA, 19 nt, Artificial Sequence
  Description of Artificial Sequence: Synthetic oligonucleotide
  Sense strand starting at position 2184 of SEQ ID NO: 1889164
cguggcuugccagagaaga

SEQ ID NO: 2582383 - RNA, 19 nt, Artificial Sequence
  Description of Artificial Sequence: Synthetic oligonucleotide
  Antisense strand to SEQ ID NO: 2582382
ucuucucuggcaagccacg

SEQ ID NO: 2582384 - RNA, 19 nt, Artificial Sequence
  Description of Artificial Sequence: Synthetic oligonucleotide
  Sense strand starting at position 2200 of SEQ ID NO: 1889164
agaagaccucuauguaguu

SEQ ID NO: 2582385 - RNA, 19 nt, Artificial Sequence
  Description of Artificial Sequence: Synthetic oligonucleotide
  Antisense strand to SEQ ID NO: 2582384
aacuacauagaggucuucu

SEQ ID NO: 2582386 - RNA, 19 nt, Artificial Sequence
  Description of Artificial Sequence: Synthetic oligonucleotide
  Sense strand starting at position 2262 of SEQ ID NO: 1889164
uggauagucucauuacccu

SEQ ID NO: 2582387 - RNA, 19 nt, Artificial Sequence
  Description of Artificial Sequence: Synthetic oligonucleotide
  Antisense strand to SEQ ID NO: 2582386
aggguaaugagacuaucca

SEQ ID NO: 2582388 - RNA, 19 nt, Artificial Sequence
  Description of Artificial Sequence: Synthetic oligonucleotide
  Sense strand starting at position 2268 of SEQ ID NO: 1889164
gucucauuacccuaggaua

SEQ ID NO: 2582389 - RNA, 19 nt, Artificial Sequence
  Description of Artificial Sequence: Synthetic oligonucleotide
  Antisense strand to SEQ ID NO: 2582388
uauccuaggguaaugagac

SEQ ID NO: 2582390 - RNA, 19 nt, Artificial Sequence
  Description of Artificial Sequence: Synthetic oligonucleotide
  Sense strand starting at position 2642 of SEQ ID NO: 1889164
aaauaauguggcugacaca

SEQ ID NO: 2582391 - RNA, 19 nt, Artificial Sequence
  Description of Artificial Sequence: Synthetic oligonucleotide
  Antisense strand to SEQ ID NO: 2582390
ugugucagccacauuauuu

SEQ ID NO: 2582392 - RNA, 19 nt, Artificial Sequence
  Description of Artificial Sequence: Synthetic oligonucleotide
  Sense strand starting at position 2762 of SEQ ID NO: 1889164
aucauaaauccgcagucaa

SEQ ID NO: 2582393 - RNA, 19 nt, Artificial Sequence
  Description of Artificial Sequence: Synthetic oligonucleotide
  Antisense strand to SEQ ID NO: 2582392
uugacugcggauuuaugau

SEQ ID NO: 2582394 - RNA, 19 nt, Artificial Sequence
  Description of Artificial Sequence: Synthetic oligonucleotide
  Sense strand starting at position 2795 of SEQ ID NO: 1889164
gagagaugucuguguccaa

SEQ ID NO: 2582395 - RNA, 19 nt, Artificial Sequence
  Description of Artificial Sequence: Synthetic oligonucleotide
  Antisense strand to SEQ ID NO: 2582394
uuggacacagacaucucuc

SEQ ID NO: 2582396 - RNA, 19 nt, Artificial Sequence
  Description of Artificial Sequence: Synthetic oligonucleotide
  Sense strand starting at position 2796 of SEQ ID NO: 1889164
agagaugucuguguccaag

SEQ ID NO: 2582397 - RNA, 19 nt, Artificial Sequence
  Description of Artificial Sequence: Synthetic oligonucleotide
  Antisense strand to SEQ ID NO: 2582396
cuuggacacagacaucucu

SEQ ID NO: 2582398 - RNA, 19 nt, Artificial Sequence
  Description of Artificial Sequence: Synthetic oligonucleotide
  Sense strand starting at position 2814 of SEQ ID NO: 1889164
gucaucucuccguaccaaa

SEQ ID NO: 2582399 - RNA, 19 nt, Artificial Sequence
  Description of Artificial Sequence: Synthetic oligonucleotide
  Antisense strand to SEQ ID NO: 2582398
uuugguacggagagaugac

SEQ ID NO: 2582400 - RNA, 19 nt, Artificial Sequence
  Description of Artificial Sequence: Synthetic oligonucleotide
  Sense strand starting at position 2878 of SEQ ID NO: 1889164
ugagauauugcccaguguu

SEQ ID NO: 2582401 - RNA, 19 nt, Artificial Sequence
  Description of Artificial Sequence: Synthetic oligonucleotide
  Antisense strand to SEQ ID NO: 2582400
aacacugggcaauaucuca

SEQ ID NO: 2582402 - RNA, 19 nt, Artificial Sequence
  Description of Artificial Sequence: Synthetic oligonucleotide
  Sense strand starting at position 3088 of SEQ ID NO: 1889164
gauacaaucuggucagggu

SEQ ID NO: 2582403 - RNA, 19 nt, Artificial Sequence
  Description of Artificial Sequence: Synthetic oligonucleotide
  Antisense strand to SEQ ID NO: 2582402
acccugaccagauuguauc

SEQ ID NO: 2582404 - RNA, 19 nt, Artificial Sequence
  Description of Artificial Sequence: Synthetic oligonucleotide
  Sense strand starting at position 3149 of SEQ ID NO: 1889164
ggugacacagaauguguuu

SEQ ID NO: 2582405 - RNA, 19 nt, Artificial Sequence
  Description of Artificial Sequence: Synthetic oligonucleotide
  Antisense strand to SEQ ID NO: 2582404
aaacacauucugugucacc

SEQ ID NO: 2582406 - RNA, 19 nt, Artificial Sequence
  Description of Artificial Sequence: Synthetic oligonucleotide
  Sense strand starting at position 3220 of SEQ ID NO: 1889164
cgguguucaagugagagua

SEQ ID NO: 2582407 - RNA, 19 nt, Artificial Sequence
  Description of Artificial Sequence: Synthetic oligonucleotide
  Antisense strand to SEQ ID NO: 2582406
uacucucacuugaacaccg

SEQ ID NO: 2582408 - RNA, 19 nt, Artificial Sequence
  Description of Artificial Sequence: Synthetic oligonucleotide
  Sense strand starting at position 3228 of SEQ ID NO: 1889164
aagugagaguacuccaaug

SEQ ID NO: 2582409 - RNA, 19 nt, Artificial Sequence
  Description of Artificial Sequence: Synthetic oligonucleotide
  Antisense strand to SEQ ID NO: 2582408
cauuggaguacucucacuu

SEQ ID NO: 2582410 - RNA, 19 nt, Artificial Sequence
  Description of Artificial Sequence: Synthetic oligonucleotide
  Sense strand starting at position 3230 of SEQ ID NO: 1889164
gugagaguacuccaaugug

SEQ ID NO: 2582411 - RNA, 19 nt, Artificial Sequence
  Description of Artificial Sequence: Synthetic oligonucleotide
  Antisense strand to SEQ ID NO: 2582410
cacauuggaguacucucac

SEQ ID NO: 2582412 - RNA, 19 nt, Artificial Sequence
  Description of Artificial Sequence: Synthetic oligonucleotide
  Sense strand starting at position 3319 of SEQ ID NO: 1889164
gccaaaugggaguggaauu

SEQ ID NO: 2582413 - RNA, 19 nt, Artificial Sequence
  Description of Artificial Sequence: Synthetic oligonucleotide
  Antisense strand to SEQ ID NO: 2582412
aauuccacucccauuuggc

SEQ ID NO: 2582414 - RNA, 19 nt, Artificial Sequence
  Description of Artificial Sequence: Synthetic oligonucleotide
  Sense strand starting at position 3479 of SEQ ID NO: 1889164
augggaauccauugcauaa

SEQ ID NO: 2582415 - RNA, 19 nt, Artificial Sequence
  Description of Artificial Sequence: Synthetic oligonucleotide
  Antisense strand to SEQ ID NO: 2582414
uuaugcaauggauucccau

SEQ ID NO: 2582416 - RNA, 19 nt, Artificial Sequence
  Description of Artificial Sequence: Synthetic oligonucleotide
  Sense strand starting at position 3616 of SEQ ID NO: 1889164
gcauaauuccuguaggaug

SEQ ID NO: 2582417 - RNA, 19 nt, Artificial Sequence
  Description of Artificial Sequence: Synthetic oligonucleotide
  Antisense strand to SEQ ID NO: 2582416
cauccuacaggaauuaugc

SEQ ID NO: 2582418 - RNA, 19 nt, Artificial Sequence
  Description of Artificial Sequence: Synthetic oligonucleotide
  Sense strand starting at position 3694 of SEQ ID NO: 1889164
acgggcuucucaucaugga

SEQ ID NO: 2582419 - RNA, 19 nt, Artificial Sequence
  Description of Artificial Sequence: Synthetic oligonucleotide
  Antisense strand to SEQ ID NO: 2582418
uccaugaugagaagcccgu

SEQ ID NO: 2582420 - RNA, 19 nt, Artificial Sequence
  Description of Artificial Sequence: Synthetic oligonucleotide
  Sense strand starting at position 3695 of SEQ ID NO: 1889164
cgggcuucucaucauggaa

SEQ ID NO: 2582421 - RNA, 19 nt, Artificial Sequence
  Description of Artificial Sequence: Synthetic oligonucleotide
  Antisense strand to SEQ ID NO: 2582420
uuccaugaugagaagcccg

SEQ ID NO: 2582422 - RNA, 19 nt, Artificial Sequence
  Description of Artificial Sequence: Synthetic oligonucleotide
  Sense strand starting at position 3727 of SEQ ID NO: 1889164
aggcuauugcuagaugaga

SEQ ID NO: 2582423 - RNA, 19 nt, Artificial Sequence
  Description of Artificial Sequence: Synthetic oligonucleotide
  Antisense strand to SEQ ID NO: 2582422
ucucaucuagcaauagccu

SEQ ID NO: 2582424 - RNA, 19 nt, Artificial Sequence
  Description of Artificial Sequence: Synthetic oligonucleotide
  Sense strand starting at position 3729 of SEQ ID NO: 1889164
gcuauugcuagaugagacu

SEQ ID NO: 2582425 - RNA, 19 nt, Artificial Sequence
  Description of Artificial Sequence: Synthetic oligonucleotide
  Antisense strand to SEQ ID NO: 2582424
agucucaucuagcaauagc

SEQ ID NO: 2582426 - RNA, 19 nt, Artificial Sequence
  Description of Artificial Sequence: Synthetic oligonucleotide
  Sense strand starting at position 3747 of SEQ ID NO: 1889164
ugccucuggccacagauua

SEQ ID NO: 2582427 - RNA, 19 nt, Artificial Sequence
  Description of Artificial Sequence: Synthetic oligonucleotide
  Antisense strand to SEQ ID NO: 2582426
uaaucuguggccagaggca

SEQ ID NO: 2582428 - RNA, 19 nt, Artificial Sequence
  Description of Artificial Sequence: Synthetic oligonucleotide
  Sense strand starting at position 3952 of SEQ ID NO: 1889164
cuugauuugucuuugcuuu

SEQ ID NO: 2582429 - RNA, 19 nt, Artificial Sequence
  Description of Artificial Sequence: Synthetic oligonucleotide
  Antisense strand to SEQ ID NO: 2582428
aaagcaaagacaaaucaag

SEQ ID NO: 2582430 - RNA, 19 nt, Artificial Sequence
  Description of Artificial Sequence: Synthetic oligonucleotide
  Sense strand starting at position 22 of SEQ ID NO: 1889165
uucuaaguauaucccgauu

SEQ ID NO: 2582431 - RNA, 19 nt, Artificial Sequence
  Description of Artificial Sequence: Synthetic oligonucleotide
  Antisense strand to SEQ ID NO: 2582430
aaucgggauauacuuagaa

SEQ ID NO: 2582432 - RNA, 19 nt, Artificial Sequence
  Description of Artificial Sequence: Synthetic oligonucleotide
  Sense strand starting at position 25 of SEQ ID NO: 1889165
uaaguauaucccgauuguu

SEQ ID NO: 2582433 - RNA, 19 nt, Artificial Sequence
  Description of Artificial Sequence: Synthetic oligonucleotide
  Antisense strand to SEQ ID NO: 2582432
aacaaucgggauauacuua

SEQ ID NO: 2582434 - RNA, 19 nt, Artificial Sequence
  Description of Artificial Sequence: Synthetic oligonucleotide
  Sense strand starting at position 330 of SEQ ID NO: 1889165
agugaauugggaggcaagu

SEQ ID NO: 2582435 - RNA, 19 nt, Artificial Sequence
  Description of Artificial Sequence: Synthetic oligonucleotide
  Antisense strand to SEQ ID NO: 2582434
acuugccucccaauucacu

SEQ ID NO: 2582436 - RNA, 19 nt, Artificial Sequence
  Description of Artificial Sequence: Synthetic oligonucleotide
  Sense strand starting at position 619 of SEQ ID NO: 1889165
ucagguaguguugaggaua

SEQ ID NO: 2582437 - RNA, 19 nt, Artificial Sequence
  Description of Artificial Sequence: Synthetic oligonucleotide
  Antisense strand to SEQ ID NO: 2582436
uauccucaacacuaccuga

SEQ ID NO: 2582438 - RNA, 19 nt, Artificial Sequence
  Description of Artificial Sequence: Synthetic oligonucleotide
  Sense strand starting at position 622 of SEQ ID NO: 1889165
gguaguguugaggauauaa

SEQ ID NO: 2582439 - RNA, 19 nt, Artificial Sequence
  Description of Artificial Sequence: Synthetic oligonucleotide
  Antisense strand to SEQ ID NO: 2582438
uuauauccucaacacuacc

SEQ ID NO: 2582440 - RNA, 19 nt, Artificial Sequence
  Description of Artificial Sequence: Synthetic oligonucleotide
  Sense strand starting at position 635 of SEQ ID NO: 1889165
auauaaucuggugagcagu

SEQ ID NO: 2582441 - RNA, 19 nt, Artificial Sequence
  Description of Artificial Sequence: Synthetic oligonucleotide
  Antisense strand to SEQ ID NO: 2582440
acugcucaccagauuauau

SEQ ID NO: 2582442 - RNA, 19 nt, Artificial Sequence
  Description of Artificial Sequence: Synthetic oligonucleotide
  Sense strand starting at position 864 of SEQ ID NO: 1889165
guauguggccuauacacuu

SEQ ID NO: 2582443 - RNA, 19 nt, Artificial Sequence
  Description of Artificial Sequence: Synthetic oligonucleotide
  Antisense strand to SEQ ID NO: 2582442
aaguguauaggccacauac

SEQ ID NO: 2582444 - RNA, 19 nt, Artificial Sequence
  Description of Artificial Sequence: Synthetic oligonucleotide
  Sense strand starting at position 989 of SEQ ID NO: 1889165
auggaaauccauugcauga

SEQ ID NO: 2582445 - RNA, 19 nt, Artificial Sequence
  Description of Artificial Sequence: Synthetic oligonucleotide
  Antisense strand to SEQ ID NO: 2582444
ucaugcaauggauuuccau

SEQ ID NO: 2582446 - RNA, 19 nt, Artificial Sequence
  Description of Artificial Sequence: Synthetic oligonucleotide
  Sense strand starting at position 1165 of SEQ ID NO: 1889165
ucugcauuugccugguaaa

SEQ ID NO: 2582447 - RNA, 19 nt, Artificial Sequence
  Description of Artificial Sequence: Synthetic oligonucleotide
  Antisense strand to SEQ ID NO: 2582446
uuuaccaggcaaaugcaga

SEQ ID NO: 2582448 - RNA, 19 nt, Artificial Sequence
  Description of Artificial Sequence: Synthetic oligonucleotide
  Sense strand starting at position 1166 of SEQ ID NO: 1889165
cugcauuugccugguaaac

SEQ ID NO: 2582449 - RNA, 19 nt, Artificial Sequence
  Description of Artificial Sequence: Synthetic oligonucleotide
  Antisense strand to SEQ ID NO: 2582448
guuuaccaggcaaaugcag

SEQ ID NO: 2582450 - RNA, 19 nt, Artificial Sequence
  Description of Artificial Sequence: Synthetic oligonucleotide
  Sense strand starting at position 1557 of SEQ ID NO: 1889165
acagacgaccucugauaca

SEQ ID NO: 2582451 - RNA, 19 nt, Artificial Sequence
  Description of Artificial Sequence: Synthetic oligonucleotide
  Antisense strand to SEQ ID NO: 2582450
uguaucagaggucgucugu

SEQ ID NO: 2582452 - RNA, 19 nt, Artificial Sequence
  Description of Artificial Sequence: Synthetic oligonucleotide
  Sense strand starting at position 1751 of SEQ ID NO: 1889165
uuaggucucagugaugauu

SEQ ID NO: 2582453 - RNA, 19 nt, Artificial Sequence
  Description of Artificial Sequence: Synthetic oligonucleotide
  Antisense strand to SEQ ID NO: 2582452
aaucaucacugagaccuaa

SEQ ID NO: 2582454 - RNA, 19 nt, Artificial Sequence
  Description of Artificial Sequence: Synthetic oligonucleotide
  Sense strand starting at position 2042 of SEQ ID NO: 1889165
cugcuuagucaggaugaca

SEQ ID NO: 2582455 - RNA, 19 nt, Artificial Sequence
  Description of Artificial Sequence: Synthetic oligonucleotide
  Antisense strand to SEQ ID NO: 2582454
ugucauccugacuaagcag

SEQ ID NO: 2582456 - RNA, 19 nt, Artificial Sequence
  Description of Artificial Sequence: Synthetic oligonucleotide
  Sense strand starting at position 2053 of SEQ ID NO: 1889165
ggaugacagcccugagagu

SEQ ID NO: 2582457 - RNA, 19 nt, Artificial Sequence
  Description of Artificial Sequence: Synthetic oligonucleotide
  Antisense strand to SEQ ID NO: 2582456
acucucagggcugucaucc

SEQ ID NO: 2582458 - RNA, 19 nt, Artificial Sequence
  Description of Artificial Sequence: Synthetic oligonucleotide
  Sense strand starting at position 2054 of SEQ ID NO: 1889165
gaugacagcccugagaguu

SEQ ID NO: 2582459 - RNA, 19 nt, Artificial Sequence
  Description of Artificial Sequence: Synthetic oligonucleotide
  Antisense strand to SEQ ID NO: 2582458
aacucucagggcugucauc

SEQ ID NO: 2582460 - RNA, 19 nt, Artificial Sequence
  Description of Artificial Sequence: Synthetic oligonucleotide
  Sense strand starting at position 2064 of SEQ ID NO: 1889165
cugagaguugguuaccuga

SEQ ID NO: 2582461 - RNA, 19 nt, Artificial Sequence
  Description of Artificial Sequence: Synthetic oligonucleotide
  Antisense strand to SEQ ID NO: 2582460
ucagguaaccaacucucag

SEQ ID NO: 2582462 - RNA, 19 nt, Artificial Sequence
  Description of Artificial Sequence: Synthetic oligonucleotide
  Sense strand starting at position 2185 of SEQ ID NO: 1889165
cguggcuugccagagaaga

SEQ ID NO: 2582463 - RNA, 19 nt, Artificial Sequence
  Description of Artificial Sequence: Synthetic oligonucleotide
  Antisense strand to SEQ ID NO: 2582462
ucuucucuggcaagccacg

SEQ ID NO: 2582464 - RNA, 19 nt, Artificial Sequence
  Description of Artificial Sequence: Synthetic oligonucleotide
  Sense strand starting at position 2201 of SEQ ID NO: 1889165
agaagaccucuauguaguu

SEQ ID NO: 2582465 - RNA, 19 nt, Artificial Sequence
  Description of Artificial Sequence: Synthetic oligonucleotide
  Antisense strand to SEQ ID NO: 2582464
aacuacauagaggucuucu

SEQ ID NO: 2582466 - RNA, 19 nt, Artificial Sequence
  Description of Artificial Sequence: Synthetic oligonucleotide
  Sense strand starting at position 2263 of SEQ ID NO: 1889165
uggauagucucauuacccu

SEQ ID NO: 2582467 - RNA, 19 nt, Artificial Sequence
  Description of Artificial Sequence: Synthetic oligonucleotide
  Antisense strand to SEQ ID NO: 2582466
aggguaaugagacuaucca

SEQ ID NO: 2582468 - RNA, 19 nt, Artificial Sequence
  Description of Artificial Sequence: Synthetic oligonucleotide
  Sense strand starting at position 2269 of SEQ ID NO: 1889165
gucucauuacccuaggaua

SEQ ID NO: 2582469 - RNA, 19 nt, Artificial Sequence
  Description of Artificial Sequence: Synthetic oligonucleotide
  Antisense strand to SEQ ID NO: 2582468
uauccuaggguaaugagac

SEQ ID NO: 2582470 - RNA, 19 nt, Artificial Sequence
  Description of Artificial Sequence: Synthetic oligonucleotide
  Sense strand starting at position 2643 of SEQ ID NO: 1889165
aaauaauguggcugacaca

SEQ ID NO: 2582471 - RNA, 19 nt, Artificial Sequence
  Description of Artificial Sequence: Synthetic oligonucleotide
  Antisense strand to SEQ ID NO: 2582470
ugugucagccacauuauuu

SEQ ID NO: 2582472 - RNA, 19 nt, Artificial Sequence
  Description of Artificial Sequence: Synthetic oligonucleotide
  Sense strand starting at position 2736 of SEQ ID NO: 1889165
gucccuguguucuuuauuu

SEQ ID NO: 2582473 - RNA, 19 nt, Artificial Sequence
  Description of Artificial Sequence: Synthetic oligonucleotide
  Antisense strand to SEQ ID NO: 2582472
aaauaaagaacacagggac

SEQ ID NO: 2582474 - RNA, 19 nt, Artificial Sequence
  Description of Artificial Sequence: Synthetic oligonucleotide
  Sense strand starting at position 2762 of SEQ ID NO: 1889165
gaucauaaauccgcaguca

SEQ ID NO: 2582475 - RNA, 19 nt, Artificial Sequence
  Description of Artificial Sequence: Synthetic oligonucleotide
  Antisense strand to SEQ ID NO: 2582474
ugacugcggauuuaugauc

SEQ ID NO: 2582476 - RNA, 19 nt, Artificial Sequence
  Description of Artificial Sequence: Synthetic oligonucleotide
  Sense strand starting at position 2763 of SEQ ID NO: 1889165
aucauaaauccgcagucaa

SEQ ID NO: 2582477 - RNA, 19 nt, Artificial Sequence
  Description of Artificial Sequence: Synthetic oligonucleotide
  Antisense strand to SEQ ID NO: 2582476
uugacugcggauuuaugau

SEQ ID NO: 2582478 - RNA, 19 nt, Artificial Sequence
  Description of Artificial Sequence: Synthetic oligonucleotide
  Sense strand starting at position 2796 of SEQ ID NO: 1889165
gagagaugucuguguccaa

SEQ ID NO: 2582479 - RNA, 19 nt, Artificial Sequence
  Description of Artificial Sequence: Synthetic oligonucleotide
  Antisense strand to SEQ ID NO: 2582478
uuggacacagacaucucuc

SEQ ID NO: 2582480 - RNA, 19 nt, Artificial Sequence
  Description of Artificial Sequence: Synthetic oligonucleotide
  Sense strand starting at position 2797 of SEQ ID NO: 1889165
agagaugucuguguccaag

SEQ ID NO: 2582481 - RNA, 19 nt, Artificial Sequence
  Description of Artificial Sequence: Synthetic oligonucleotide
  Antisense strand to SEQ ID NO: 2582480
cuuggacacagacaucucu

SEQ ID NO: 2582482 - RNA, 19 nt, Artificial Sequence
  Description of Artificial Sequence: Synthetic oligonucleotide
  Sense strand starting at position 2815 of SEQ ID NO: 1889165
gucaucucuccguaccaaa

SEQ ID NO: 2582483 - RNA, 19 nt, Artificial Sequence
  Description of Artificial Sequence: Synthetic oligonucleotide
  Antisense strand to SEQ ID NO: 2582482
uuugguacggagagaugac

SEQ ID NO: 2582484 - RNA, 19 nt, Artificial Sequence
  Description of Artificial Sequence: Synthetic oligonucleotide
  Sense strand starting at position 2879 of SEQ ID NO: 1889165
ugagauauugcccaguguu

SEQ ID NO: 2582485 - RNA, 19 nt, Artificial Sequence
  Description of Artificial Sequence: Synthetic oligonucleotide
  Antisense strand to SEQ ID NO: 2582484
aacacugggcaauaucuca

SEQ ID NO: 2582486 - RNA, 19 nt, Artificial Sequence
  Description of Artificial Sequence: Synthetic oligonucleotide
  Sense strand starting at position 3089 of SEQ ID NO: 1889165
gauacaaucuggucagggu

SEQ ID NO: 2582487 - RNA, 19 nt, Artificial Sequence
  Description of Artificial Sequence: Synthetic oligonucleotide
  Antisense strand to SEQ ID NO: 2582486
acccugaccagauuguauc

SEQ ID NO: 2582488 - RNA, 19 nt, Artificial Sequence
  Description of Artificial Sequence: Synthetic oligonucleotide
  Sense strand starting at position 3150 of SEQ ID NO: 1889165
ggugacacagaauguguuu

SEQ ID NO: 2582489 - RNA, 19 nt, Artificial Sequence
  Description of Artificial Sequence: Synthetic oligonucleotide
  Antisense strand to SEQ ID NO: 2582488
aaacacauucugugucacc

SEQ ID NO: 2582490 - RNA, 19 nt, Artificial Sequence
  Description of Artificial Sequence: Synthetic oligonucleotide
  Sense strand starting at position 3221 of SEQ ID NO: 1889165
cgguguucaagugagagua

SEQ ID NO: 2582491 - RNA, 19 nt, Artificial Sequence
  Description of Artificial Sequence: Synthetic oligonucleotide
  Antisense strand to SEQ ID NO: 2582490
uacucucacuugaacaccg

SEQ ID NO: 2582492 - RNA, 19 nt, Artificial Sequence
  Description of Artificial Sequence: Synthetic oligonucleotide
  Sense strand starting at position 3229 of SEQ ID NO: 1889165
aagugagaguacuccaaug

SEQ ID NO: 2582493 - RNA, 19 nt, Artificial Sequence
  Description of Artificial Sequence: Synthetic oligonucleotide
  Antisense strand to SEQ ID NO: 2582492
cauuggaguacucucacuu

SEQ ID NO: 2582494 - RNA, 19 nt, Artificial Sequence
  Description of Artificial Sequence: Synthetic oligonucleotide
  Sense strand starting at position 3320 of SEQ ID NO: 1889165
gccaaaugggaguggaauu

SEQ ID NO: 2582495 - RNA, 19 nt, Artificial Sequence
  Description of Artificial Sequence: Synthetic oligonucleotide
  Antisense strand to SEQ ID NO: 2582494
aauuccacucccauuuggc

SEQ ID NO: 2582496 - RNA, 19 nt, Artificial Sequence
  Description of Artificial Sequence: Synthetic oligonucleotide
  Sense strand starting at position 3480 of SEQ ID NO: 1889165
augggaauccauugcauaa

SEQ ID NO: 2582497 - RNA, 19 nt, Artificial Sequence
  Description of Artificial Sequence: Synthetic oligonucleotide
  Antisense strand to SEQ ID NO: 2582496
uuaugcaauggauucccau

SEQ ID NO: 2582498 - RNA, 19 nt, Artificial Sequence
  Description of Artificial Sequence: Synthetic oligonucleotide
  Sense strand starting at position 3495 of SEQ ID NO: 1889165
auaaguguuuccuucuaaa

SEQ ID NO: 2582499 - RNA, 19 nt, Artificial Sequence
  Description of Artificial Sequence: Synthetic oligonucleotide
  Antisense strand to SEQ ID NO: 2582498
uuuagaaggaaacacuuau

SEQ ID NO: 2582500 - RNA, 19 nt, Artificial Sequence
  Description of Artificial Sequence: Synthetic oligonucleotide
  Sense strand starting at position 3617 of SEQ ID NO: 1889165
gcauaauuccuguaggaug

SEQ ID NO: 2582501 - RNA, 19 nt, Artificial Sequence
  Description of Artificial Sequence: Synthetic oligonucleotide
  Antisense strand to SEQ ID NO: 2582500
cauccuacaggaauuaugc

SEQ ID NO: 2582502 - RNA, 19 nt, Artificial Sequence
  Description of Artificial Sequence: Synthetic oligonucleotide
  Sense strand starting at position 3695 of SEQ ID NO: 1889165
acgggcuucucaucaugga

SEQ ID NO: 2582503 - RNA, 19 nt, Artificial Sequence
  Description of Artificial Sequence: Synthetic oligonucleotide
  Antisense strand to SEQ ID NO: 2582502
uccaugaugagaagcccgu

SEQ ID NO: 2582504 - RNA, 19 nt, Artificial Sequence
  Description of Artificial Sequence: Synthetic oligonucleotide
  Sense strand starting at position 3696 of SEQ ID NO: 1889165
cgggcuucucaucauggaa

SEQ ID NO: 2582505 - RNA, 19 nt, Artificial Sequence
  Description of Artificial Sequence: Synthetic oligonucleotide
  Antisense strand to SEQ ID NO: 2582504
uuccaugaugagaagcccg

SEQ ID NO: 2582506 - RNA, 19 nt, Artificial Sequence
  Description of Artificial Sequence: Synthetic oligonucleotide
  Sense strand starting at position 3728 of SEQ ID NO: 1889165
aggcuauugcuagaugaga

SEQ ID NO: 2582507 - RNA, 19 nt, Artificial Sequence
  Description of Artificial Sequence: Synthetic oligonucleotide
  Antisense strand to SEQ ID NO: 2582506
ucucaucuagcaauagccu

SEQ ID NO: 2582508 - RNA, 19 nt, Artificial Sequence
  Description of Artificial Sequence: Synthetic oligonucleotide
  Sense strand starting at position 3730 of SEQ ID NO: 1889165
gcuauugcuagaugagacu

SEQ ID NO: 2582509 - RNA, 19 nt, Artificial Sequence
  Description of Artificial Sequence: Synthetic oligonucleotide
  Antisense strand to SEQ ID NO: 2582508
agucucaucuagcaauagc

SEQ ID NO: 2582510 - RNA, 19 nt, Artificial Sequence
  Description of Artificial Sequence: Synthetic oligonucleotide
  Sense strand starting at position 24 of SEQ ID NO: 1889166
uaaguauaucccgauuguu

SEQ ID NO: 2582511 - RNA, 19 nt, Artificial Sequence
  Description of Artificial Sequence: Synthetic oligonucleotide
  Antisense strand to SEQ ID NO: 2582510
aacaaucgggauauacuua

SEQ ID NO: 2582512 - RNA, 19 nt, Artificial Sequence
  Description of Artificial Sequence: Synthetic oligonucleotide
  Sense strand starting at position 329 of SEQ ID NO: 1889166
agugaauugggaggcaagu

SEQ ID NO: 2582513 - RNA, 19 nt, Artificial Sequence
  Description of Artificial Sequence: Synthetic oligonucleotide
  Antisense strand to SEQ ID NO: 2582512
acuugccucccaauucacu

SEQ ID NO: 2582514 - RNA, 19 nt, Artificial Sequence
  Description of Artificial Sequence: Synthetic oligonucleotide
  Sense strand starting at position 618 of SEQ ID NO: 1889166
ucagguaguguugaggaua

SEQ ID NO: 2582515 - RNA, 19 nt, Artificial Sequence
  Description of Artificial Sequence: Synthetic oligonucleotide
  Antisense strand to SEQ ID NO: 2582514
uauccucaacacuaccuga

SEQ ID NO: 2582516 - RNA, 19 nt, Artificial Sequence
  Description of Artificial Sequence: Synthetic oligonucleotide
  Sense strand starting at position 621 of SEQ ID NO: 1889166
gguaguguugaggauauaa

SEQ ID NO: 2582517 - RNA, 19 nt, Artificial Sequence
  Description of Artificial Sequence: Synthetic oligonucleotide
  Antisense strand to SEQ ID NO: 2582516
uuauauccucaacacuacc

SEQ ID NO: 2582518 - RNA, 19 nt, Artificial Sequence
  Description of Artificial Sequence: Synthetic oligonucleotide
  Sense strand starting at position 634 of SEQ ID NO: 1889166
auauaaucuggugagcagu

SEQ ID NO: 2582519 - RNA, 19 nt, Artificial Sequence
  Description of Artificial Sequence: Synthetic oligonucleotide
  Antisense strand to SEQ ID NO: 2582518
acugcucaccagauuauau

SEQ ID NO: 2582520 - RNA, 19 nt, Artificial Sequence
  Description of Artificial Sequence: Synthetic oligonucleotide
  Sense strand starting at position 1003 of SEQ ID NO: 1889166
augaguguuucuuucuaaa

SEQ ID NO: 2582521 - RNA, 19 nt, Artificial Sequence
  Description of Artificial Sequence: Synthetic oligonucleotide
  Antisense strand to SEQ ID NO: 2582520
uuuagaaagaaacacucau

SEQ ID NO: 2582522 - RNA, 19 nt, Artificial Sequence
  Description of Artificial Sequence: Synthetic oligonucleotide
  Sense strand starting at position 1164 of SEQ ID NO: 1889166
ucugcauuugccugguaaa

SEQ ID NO: 2582523 - RNA, 19 nt, Artificial Sequence
  Description of Artificial Sequence: Synthetic oligonucleotide
  Antisense strand to SEQ ID NO: 2582522
uuuaccaggcaaaugcaga

SEQ ID NO: 2582524 - RNA, 19 nt, Artificial Sequence
  Description of Artificial Sequence: Synthetic oligonucleotide
  Sense strand starting at position 1165 of SEQ ID NO: 1889166
cugcauuugccugguaaac

SEQ ID NO: 2582525 - RNA, 19 nt, Artificial Sequence
  Description of Artificial Sequence: Synthetic oligonucleotide
  Antisense strand to SEQ ID NO: 2582524
guuuaccaggcaaaugcag

SEQ ID NO: 2582526 - RNA, 19 nt, Artificial Sequence
  Description of Artificial Sequence: Synthetic oligonucleotide
  Sense strand starting at position 1556 of SEQ ID NO: 1889166
acagacgaccucugauaca

SEQ ID NO: 2582527 - RNA, 19 nt, Artificial Sequence
  Description of Artificial Sequence: Synthetic oligonucleotide
  Antisense strand to SEQ ID NO: 2582526
uguaucagaggucgucugu

SEQ ID NO: 2582528 - RNA, 19 nt, Artificial Sequence
  Description of Artificial Sequence: Synthetic oligonucleotide
  Sense strand starting at position 1607 of SEQ ID NO: 1889166
caguuugaagugugagaac

SEQ ID NO: 2582529 - RNA, 19 nt, Artificial Sequence
  Description of Artificial Sequence: Synthetic oligonucleotide
  Antisense strand to SEQ ID NO: 2582528
guucucacacuucaaacug

SEQ ID NO: 2582530 - RNA, 19 nt, Artificial Sequence
  Description of Artificial Sequence: Synthetic oligonucleotide
  Sense strand starting at position 1750 of SEQ ID NO: 1889166
uuaggucucagugaugauu

SEQ ID NO: 2582531 - RNA, 19 nt, Artificial Sequence
  Description of Artificial Sequence: Synthetic oligonucleotide
  Antisense strand to SEQ ID NO: 2582530
aaucaucacugagaccuaa

SEQ ID NO: 2582532 - RNA, 19 nt, Artificial Sequence
  Description of Artificial Sequence: Synthetic oligonucleotide
  Sense strand starting at position 1797 of SEQ ID NO: 1889166
accagaugguauuccaauc

SEQ ID NO: 2582533 - RNA, 19 nt, Artificial Sequence
  Description of Artificial Sequence: Synthetic oligonucleotide
  Antisense strand to SEQ ID NO: 2582532
gauuggaauaccaucuggu

SEQ ID NO: 2582534 - RNA, 19 nt, Artificial Sequence
  Description of Artificial Sequence: Synthetic oligonucleotide
  Sense strand starting at position 2041 of SEQ ID NO: 1889166
cugcuuagucaggaugaca

SEQ ID NO: 2582535 - RNA, 19 nt, Artificial Sequence
  Description of Artificial Sequence: Synthetic oligonucleotide
  Antisense strand to SEQ ID NO: 2582534
ugucauccugacuaagcag

SEQ ID NO: 2582536 - RNA, 19 nt, Artificial Sequence
  Description of Artificial Sequence: Synthetic oligonucleotide
  Sense strand starting at position 2052 of SEQ ID NO: 1889166
ggaugacagcccugagagu

SEQ ID NO: 2582537 - RNA, 19 nt, Artificial Sequence
  Description of Artificial Sequence: Synthetic oligonucleotide
  Antisense strand to SEQ ID NO: 2582536
acucucagggcugucaucc

SEQ ID NO: 2582538 - RNA, 19 nt, Artificial Sequence
  Description of Artificial Sequence: Synthetic oligonucleotide
  Sense strand starting at position 2053 of SEQ ID NO: 1889166
gaugacagcccugagaguu

SEQ ID NO: 2582539 - RNA, 19 nt, Artificial Sequence
  Description of Artificial Sequence: Synthetic oligonucleotide
  Antisense strand to SEQ ID NO: 2582538
aacucucagggcugucauc

SEQ ID NO: 2582540 - RNA, 19 nt, Artificial Sequence
  Description of Artificial Sequence: Synthetic oligonucleotide
  Sense strand starting at position 2063 of SEQ ID NO: 1889166
cugagaguugguuaccuga

SEQ ID NO: 2582541 - RNA, 19 nt, Artificial Sequence
  Description of Artificial Sequence: Synthetic oligonucleotide
  Antisense strand to SEQ ID NO: 2582540
ucagguaaccaacucucag

SEQ ID NO: 2582542 - RNA, 19 nt, Artificial Sequence
  Description of Artificial Sequence: Synthetic oligonucleotide
  Sense strand starting at position 2184 of SEQ ID NO: 1889166
cguggcuugccagagaaga

SEQ ID NO: 2582543 - RNA, 19 nt, Artificial Sequence
  Description of Artificial Sequence: Synthetic oligonucleotide
  Antisense strand to SEQ ID NO: 2582542
ucuucucuggcaagccacg

SEQ ID NO: 2582544 - RNA, 19 nt, Artificial Sequence
  Description of Artificial Sequence: Synthetic oligonucleotide
  Sense strand starting at position 2200 of SEQ ID NO: 1889166
agaagaccucuauguaguu

SEQ ID NO: 2582545 - RNA, 19 nt, Artificial Sequence
  Description of Artificial Sequence: Synthetic oligonucleotide
  Antisense strand to SEQ ID NO: 2582544
aacuacauagaggucuucu

SEQ ID NO: 2582546 - RNA, 19 nt, Artificial Sequence
  Description of Artificial Sequence: Synthetic oligonucleotide
  Sense strand starting at position 2262 of SEQ ID NO: 1889166
uggauagucucauuacccu

SEQ ID NO: 2582547 - RNA, 19 nt, Artificial Sequence
  Description of Artificial Sequence: Synthetic oligonucleotide
  Antisense strand to SEQ ID NO: 2582546
aggguaaugagacuaucca

SEQ ID NO: 2582548 - RNA, 19 nt, Artificial Sequence
  Description of Artificial Sequence: Synthetic oligonucleotide
  Sense strand starting at position 2268 of SEQ ID NO: 1889166
gucucauuacccuaggaua

SEQ ID NO: 2582549 - RNA, 19 nt, Artificial Sequence
  Description of Artificial Sequence: Synthetic oligonucleotide
  Antisense strand to SEQ ID NO: 2582548
uauccuaggguaaugagac

SEQ ID NO: 2582550 - RNA, 19 nt, Artificial Sequence
  Description of Artificial Sequence: Synthetic oligonucleotide
  Sense strand starting at position 2642 of SEQ ID NO: 1889166
aaauaauguggcugacaca

SEQ ID NO: 2582551 - RNA, 19 nt, Artificial Sequence
  Description of Artificial Sequence: Synthetic oligonucleotide
  Antisense strand to SEQ ID NO: 2582550
ugugucagccacauuauuu

SEQ ID NO: 2582552 - RNA, 19 nt, Artificial Sequence
  Description of Artificial Sequence: Synthetic oligonucleotide
  Sense strand starting at position 2762 of SEQ ID NO: 1889166
aucauaaauccgcagucaa

SEQ ID NO: 2582553 - RNA, 19 nt, Artificial Sequence
  Description of Artificial Sequence: Synthetic oligonucleotide
  Antisense strand to SEQ ID NO: 2582552
uugacugcggauuuaugau

SEQ ID NO: 2582554 - RNA, 19 nt, Artificial Sequence
  Description of Artificial Sequence: Synthetic oligonucleotide
  Sense strand starting at position 2795 of SEQ ID NO: 1889166
gagagaugucuguguccaa

SEQ ID NO: 2582555 - RNA, 19 nt, Artificial Sequence
  Description of Artificial Sequence: Synthetic oligonucleotide
  Antisense strand to SEQ ID NO: 2582554
uuggacacagacaucucuc

SEQ ID NO: 2582556 - RNA, 19 nt, Artificial Sequence
  Description of Artificial Sequence: Synthetic oligonucleotide
  Sense strand starting at position 2796 of SEQ ID NO: 1889166
agagaugucuguguccaag

SEQ ID NO: 2582557 - RNA, 19 nt, Artificial Sequence
  Description of Artificial Sequence: Synthetic oligonucleotide
  Antisense strand to SEQ ID NO: 2582556
cuuggacacagacaucucu

SEQ ID NO: 2582558 - RNA, 19 nt, Artificial Sequence
  Description of Artificial Sequence: Synthetic oligonucleotide
  Sense strand starting at position 2814 of SEQ ID NO: 1889166
gucaucucuccguaccaaa

SEQ ID NO: 2582559 - RNA, 19 nt, Artificial Sequence
  Description of Artificial Sequence: Synthetic oligonucleotide
  Antisense strand to SEQ ID NO: 2582558
uuugguacggagagaugac

SEQ ID NO: 2582560 - RNA, 19 nt, Artificial Sequence
  Description of Artificial Sequence: Synthetic oligonucleotide
  Sense strand starting at position 2878 of SEQ ID NO: 1889166
ugagauauugcccaguguu

SEQ ID NO: 2582561 - RNA, 19 nt, Artificial Sequence
  Description of Artificial Sequence: Synthetic oligonucleotide
  Antisense strand to SEQ ID NO: 2582560
aacacugggcaauaucuca

SEQ ID NO: 2582562 - RNA, 19 nt, Artificial Sequence
  Description of Artificial Sequence: Synthetic oligonucleotide
  Sense strand starting at position 3088 of SEQ ID NO: 1889166
gauacaaucuggucagggu

SEQ ID NO: 2582563 - RNA, 19 nt, Artificial Sequence
  Description of Artificial Sequence: Synthetic oligonucleotide
  Antisense strand to SEQ ID NO: 2582562
acccugaccagauuguauc

SEQ ID NO: 2582564 - RNA, 19 nt, Artificial Sequence
  Description of Artificial Sequence: Synthetic oligonucleotide
  Sense strand starting at position 3149 of SEQ ID NO: 1889166
ggugacacagaauguguuu

SEQ ID NO: 2582565 - RNA, 19 nt, Artificial Sequence
  Description of Artificial Sequence: Synthetic oligonucleotide
  Antisense strand to SEQ ID NO: 2582564
aaacacauucugugucacc

SEQ ID NO: 2582566 - RNA, 19 nt, Artificial Sequence
  Description of Artificial Sequence: Synthetic oligonucleotide
  Sense strand starting at position 3220 of SEQ ID NO: 1889166
cgguguucaagugagagua

SEQ ID NO: 2582567 - RNA, 19 nt, Artificial Sequence
  Description of Artificial Sequence: Synthetic oligonucleotide
  Antisense strand to SEQ ID NO: 2582566
uacucucacuugaacaccg

SEQ ID NO: 2582568 - RNA, 19 nt, Artificial Sequence
  Description of Artificial Sequence: Synthetic oligonucleotide
  Sense strand starting at position 3228 of SEQ ID NO: 1889166
aagugagaguacuccaaug

SEQ ID NO: 2582569 - RNA, 19 nt, Artificial Sequence
  Description of Artificial Sequence: Synthetic oligonucleotide
  Antisense strand to SEQ ID NO: 2582568
cauuggaguacucucacuu

SEQ ID NO: 2582570 - RNA, 19 nt, Artificial Sequence
  Description of Artificial Sequence: Synthetic oligonucleotide
  Sense strand starting at position 3230 of SEQ ID NO: 1889166
gugagaguacuccaaugug

SEQ ID NO: 2582571 - RNA, 19 nt, Artificial Sequence
  Description of Artificial Sequence: Synthetic oligonucleotide
  Antisense strand to SEQ ID NO: 2582570
cacauuggaguacucucac

SEQ ID NO: 2582572 - RNA, 19 nt, Artificial Sequence
  Description of Artificial Sequence: Synthetic oligonucleotide
  Sense strand starting at position 3319 of SEQ ID NO: 1889166
gccaaaugggaguggaauu

SEQ ID NO: 2582573 - RNA, 19 nt, Artificial Sequence
  Description of Artificial Sequence: Synthetic oligonucleotide
  Antisense strand to SEQ ID NO: 2582572
aauuccacucccauuuggc

SEQ ID NO: 2582574 - RNA, 19 nt, Artificial Sequence
  Description of Artificial Sequence: Synthetic oligonucleotide
  Sense strand starting at position 3479 of SEQ ID NO: 1889166
augggaauccauugcauaa

SEQ ID NO: 2582575 - RNA, 19 nt, Artificial Sequence
  Description of Artificial Sequence: Synthetic oligonucleotide
  Antisense strand to SEQ ID NO: 2582574
uuaugcaauggauucccau

SEQ ID NO: 2582576 - RNA, 19 nt, Artificial Sequence
  Description of Artificial Sequence: Synthetic oligonucleotide
  Sense strand starting at position 3616 of SEQ ID NO: 1889166
gcauaauuccuguaggaug

SEQ ID NO: 2582577 - RNA, 19 nt, Artificial Sequence
  Description of Artificial Sequence: Synthetic oligonucleotide
  Antisense strand to SEQ ID NO: 2582576
cauccuacaggaauuaugc

SEQ ID NO: 2582578 - RNA, 19 nt, Artificial Sequence
  Description of Artificial Sequence: Synthetic oligonucleotide
  Sense strand starting at position 3694 of SEQ ID NO: 1889166
acgggcuucucaucaugga

SEQ ID NO: 2582579 - RNA, 19 nt, Artificial Sequence
  Description of Artificial Sequence: Synthetic oligonucleotide
  Antisense strand to SEQ ID NO: 2582578
uccaugaugagaagcccgu

SEQ ID NO: 2582580 - RNA, 19 nt, Artificial Sequence
  Description of Artificial Sequence: Synthetic oligonucleotide
  Sense strand starting at position 3695 of SEQ ID NO: 1889166
cgggcuucucaucauggaa

SEQ ID NO: 2582581 - RNA, 19 nt, Artificial Sequence
  Description of Artificial Sequence: Synthetic oligonucleotide
  Antisense strand to SEQ ID NO: 2582580
uuccaugaugagaagcccg

SEQ ID NO: 2582582 - RNA, 19 nt, Artificial Sequence
  Description of Artificial Sequence: Synthetic oligonucleotide
  Sense strand starting at position 3727 of SEQ ID NO: 1889166
aggcuauugcuagaugaga

SEQ ID NO: 2582583 - RNA, 19 nt, Artificial Sequence
  Description of Artificial Sequence: Synthetic oligonucleotide
  Antisense strand to SEQ ID NO: 2582582
ucucaucuagcaauagccu

SEQ ID NO: 2582584 - RNA, 19 nt, Artificial Sequence
  Description of Artificial Sequence: Synthetic oligonucleotide
  Sense strand starting at position 3729 of SEQ ID NO: 1889166
gcuauugcuagaugagacu

SEQ ID NO: 2582585 - RNA, 19 nt, Artificial Sequence
  Description of Artificial Sequence: Synthetic oligonucleotide
  Antisense strand to SEQ ID NO: 2582584
agucucaucuagcaauagc

SEQ ID NO: 2582586 - RNA, 19 nt, Artificial Sequence
  Description of Artificial Sequence: Synthetic oligonucleotide
  Sense strand starting at position 3747 of SEQ ID NO: 1889166
ugccucuggccacagauua

SEQ ID NO: 2582587 - RNA, 19 nt, Artificial Sequence
  Description of Artificial Sequence: Synthetic oligonucleotide
  Antisense strand to SEQ ID NO: 2582586
uaaucuguggccagaggca

SEQ ID NO: 2582588 - RNA, 19 nt, Artificial Sequence
  Description of Artificial Sequence: Synthetic oligonucleotide
  Sense strand starting at position 3952 of SEQ ID NO: 1889166
cuugauuugucuuugcuuu

SEQ ID NO: 2582589 - RNA, 19 nt, Artificial Sequence
  Description of Artificial Sequence: Synthetic oligonucleotide
  Antisense strand to SEQ ID NO: 2582588
aaagcaaagacaaaucaag

SEQ ID NO: 2582590 - RNA, 19 nt, Artificial Sequence
  Description of Artificial Sequence: Synthetic oligonucleotide
  Sense strand starting at position 18 of SEQ ID NO: 1889167
agaguucuuugggugauag

SEQ ID NO: 2582591 - RNA, 19 nt, Artificial Sequence
  Description of Artificial Sequence: Synthetic oligonucleotide
  Antisense strand to SEQ ID NO: 2582590
cuaucacccaaagaacucu

SEQ ID NO: 2582592 - RNA, 19 nt, Artificial Sequence
  Description of Artificial Sequence: Synthetic oligonucleotide
  Sense strand starting at position 19 of SEQ ID NO: 1889167
gaguucuuugggugauaga

SEQ ID NO: 2582593 - RNA, 19 nt, Artificial Sequence
  Description of Artificial Sequence: Synthetic oligonucleotide
  Antisense strand to SEQ ID NO: 2582592
ucuaucacccaaagaacuc

SEQ ID NO: 2582594 - RNA, 19 nt, Artificial Sequence
  Description of Artificial Sequence: Synthetic oligonucleotide
  Sense strand starting at position 20 of SEQ ID NO: 1889167
aguucuuugggugauagaa

SEQ ID NO: 2582595 - RNA, 19 nt, Artificial Sequence
  Description of Artificial Sequence: Synthetic oligonucleotide
  Antisense strand to SEQ ID NO: 2582594
uucuaucacccaaagaacu

SEQ ID NO: 2582596 - RNA, 19 nt, Artificial Sequence
  Description of Artificial Sequence: Synthetic oligonucleotide
  Sense strand starting at position 33 of SEQ ID NO: 1889167
auagaaucuuucgugagac

SEQ ID NO: 2582597 - RNA, 19 nt, Artificial Sequence
  Description of Artificial Sequence: Synthetic oligonucleotide
  Antisense strand to SEQ ID NO: 2582596
gucucacgaaagauucuau

SEQ ID NO: 2582598 - RNA, 19 nt, Artificial Sequence
  Description of Artificial Sequence: Synthetic oligonucleotide
  Sense strand starting at position 35 of SEQ ID NO: 1889167
agaaucuuucgugagacug

SEQ ID NO: 2582599 - RNA, 19 nt, Artificial Sequence
  Description of Artificial Sequence: Synthetic oligonucleotide
  Antisense strand to SEQ ID NO: 2582598
cagucucacgaaagauucu

SEQ ID NO: 2582600 - RNA, 19 nt, Artificial Sequence
  Description of Artificial Sequence: Synthetic oligonucleotide
  Sense strand starting at position 59 of SEQ ID NO: 1889167
gcaagugucagugaaagau

SEQ ID NO: 2582601 - RNA, 19 nt, Artificial Sequence
  Description of Artificial Sequence: Synthetic oligonucleotide
  Antisense strand to SEQ ID NO: 2582600
aucuuucacugacacuugc

SEQ ID NO: 2582602 - RNA, 19 nt, Artificial Sequence
  Description of Artificial Sequence: Synthetic oligonucleotide
  Sense strand starting at position 205 of SEQ ID NO: 1889167
cacagccaucuguggaaau

SEQ ID NO: 2582603 - RNA, 19 nt, Artificial Sequence
  Description of Artificial Sequence: Synthetic oligonucleotide
  Antisense strand to SEQ ID NO: 2582602
auuuccacagauggcugug

SEQ ID NO: 2582604 - RNA, 19 nt, Artificial Sequence
  Description of Artificial Sequence: Synthetic oligonucleotide
  Sense strand starting at position 350 of SEQ ID NO: 1889167
aaugauuucugucaaagga

SEQ ID NO: 2582605 - RNA, 19 nt, Artificial Sequence
  Description of Artificial Sequence: Synthetic oligonucleotide
  Antisense strand to SEQ ID NO: 2582604
uccuuugacagaaaucauu

SEQ ID NO: 2582606 - RNA, 19 nt, Artificial Sequence
  Description of Artificial Sequence: Synthetic oligonucleotide
  Sense strand starting at position 557 of SEQ ID NO: 1889167
gguugugcagaugaaauga

SEQ ID NO: 2582607 - RNA, 19 nt, Artificial Sequence
  Description of Artificial Sequence: Synthetic oligonucleotide
  Antisense strand to SEQ ID NO: 2582606
ucauuucaucugcacaacc

SEQ ID NO: 2582608 - RNA, 19 nt, Artificial Sequence
  Description of Artificial Sequence: Synthetic oligonucleotide
  Sense strand starting at position 685 of SEQ ID NO: 1889167
gcagcuauagcuggaauuu

SEQ ID NO: 2582609 - RNA, 19 nt, Artificial Sequence
  Description of Artificial Sequence: Synthetic oligonucleotide
  Antisense strand to SEQ ID NO: 2582608
aaauuccagcuauagcugc

SEQ ID NO: 2582610 - RNA, 19 nt, Artificial Sequence
  Description of Artificial Sequence: Synthetic oligonucleotide
  Sense strand starting at position 942 of SEQ ID NO: 1889167
ugacuauggguaugaaauc

SEQ ID NO: 2582611 - RNA, 19 nt, Artificial Sequence
  Description of Artificial Sequence: Synthetic oligonucleotide
  Antisense strand to SEQ ID NO: 2582610
gauuucauacccauaguca

SEQ ID NO: 2582612 - RNA, 19 nt, Artificial Sequence
  Description of Artificial Sequence: Synthetic oligonucleotide
  Sense strand starting at position 1052 of SEQ ID NO: 1889167
uuguaaacugcuugagaaa

SEQ ID NO: 2582613 - RNA, 19 nt, Artificial Sequence
  Description of Artificial Sequence: Synthetic oligonucleotide
  Antisense strand to SEQ ID NO: 2582612
uuucucaagcaguuuacaa

SEQ ID NO: 2582614 - RNA, 19 nt, Artificial Sequence
  Description of Artificial Sequence: Synthetic oligonucleotide
  Sense strand starting at position 1053 of SEQ ID NO: 1889167
uguaaacugcuugagaaau

SEQ ID NO: 2582615 - RNA, 19 nt, Artificial Sequence
  Description of Artificial Sequence: Synthetic oligonucleotide
  Antisense strand to SEQ ID NO: 2582614
auuucucaagcaguuuaca

SEQ ID NO: 2582616 - RNA, 19 nt, Artificial Sequence
  Description of Artificial Sequence: Synthetic oligonucleotide
  Sense strand starting at position 1298 of SEQ ID NO: 1889167
guaaauugaagguggacau

SEQ ID NO: 2582617 - RNA, 19 nt, Artificial Sequence
  Description of Artificial Sequence: Synthetic oligonucleotide
  Antisense strand to SEQ ID NO: 2582616
auguccaccuucaauuuac

SEQ ID NO: 2582618 - RNA, 19 nt, Artificial Sequence
  Description of Artificial Sequence: Synthetic oligonucleotide
  Sense strand starting at position 1308 of SEQ ID NO: 1889167
gguggacaugacuauuagu

SEQ ID NO: 2582619 - RNA, 19 nt, Artificial Sequence
  Description of Artificial Sequence: Synthetic oligonucleotide
  Antisense strand to SEQ ID NO: 2582618
acuaauagucauguccacc

SEQ ID NO: 2582620 - RNA, 19 nt, Artificial Sequence
  Description of Artificial Sequence: Synthetic oligonucleotide
  Sense strand starting at position 1602 of SEQ ID NO: 1889167
uugcuuuaagcagauucua

SEQ ID NO: 2582621 - RNA, 19 nt, Artificial Sequence
  Description of Artificial Sequence: Synthetic oligonucleotide
  Antisense strand to SEQ ID NO: 2582620
uagaaucugcuuaaagcaa

SEQ ID NO: 2582622 - RNA, 19 nt, Artificial Sequence
  Description of Artificial Sequence: Synthetic oligonucleotide
  Sense strand starting at position 1610 of SEQ ID NO: 1889167
agcagauucuacuuauagg

SEQ ID NO: 2582623 - RNA, 19 nt, Artificial Sequence
  Description of Artificial Sequence: Synthetic oligonucleotide
  Antisense strand to SEQ ID NO: 2582622
ccuauaaguagaaucugcu

SEQ ID NO: 2582624 - RNA, 19 nt, Artificial Sequence
  Description of Artificial Sequence: Synthetic oligonucleotide
  Sense strand starting at position 1798 of SEQ ID NO: 1889167
augggcuguaccuagaaau

SEQ ID NO: 2582625 - RNA, 19 nt, Artificial Sequence
  Description of Artificial Sequence: Synthetic oligonucleotide
  Antisense strand to SEQ ID NO: 2582624
auuucuagguacagcccau

SEQ ID NO: 2582626 - RNA, 19 nt, Artificial Sequence
  Description of Artificial Sequence: Synthetic oligonucleotide
  Sense strand starting at position 2043 of SEQ ID NO: 1889167
gggcuacuucucuaccuua

SEQ ID NO: 2582627 - RNA, 19 nt, Artificial Sequence
  Description of Artificial Sequence: Synthetic oligonucleotide
  Antisense strand to SEQ ID NO: 2582626
uaagguagagaaguagccc

SEQ ID NO: 2582628 - RNA, 19 nt, Artificial Sequence
  Description of Artificial Sequence: Synthetic oligonucleotide
  Sense strand starting at position 2361 of SEQ ID NO: 1889167
ugaggugguccauggaaac

SEQ ID NO: 2582629 - RNA, 19 nt, Artificial Sequence
  Description of Artificial Sequence: Synthetic oligonucleotide
  Antisense strand to SEQ ID NO: 2582628
guuuccauggaccaccuca

SEQ ID NO: 2582630 - RNA, 19 nt, Artificial Sequence
  Description of Artificial Sequence: Synthetic oligonucleotide
  Sense strand starting at position 2367 of SEQ ID NO: 1889167
gguccauggaaacgauauu

SEQ ID NO: 2582631 - RNA, 19 nt, Artificial Sequence
  Description of Artificial Sequence: Synthetic oligonucleotide
  Antisense strand to SEQ ID NO: 2582630
aauaucguuuccauggacc

SEQ ID NO: 2582632 - RNA, 19 nt, Artificial Sequence
  Description of Artificial Sequence: Synthetic oligonucleotide
  Sense strand starting at position 2400 of SEQ ID NO: 1889167
gaaagaggcugugucaaag

SEQ ID NO: 2582633 - RNA, 19 nt, Artificial Sequence
  Description of Artificial Sequence: Synthetic oligonucleotide
  Antisense strand to SEQ ID NO: 2582632
cuuugacacagccucuuuc

SEQ ID NO: 2582634 - RNA, 19 nt, Artificial Sequence
  Description of Artificial Sequence: Synthetic oligonucleotide
  Sense strand starting at position 2406 of SEQ ID NO: 1889167
ggcugugucaaagaaucuu

SEQ ID NO: 2582635 - RNA, 19 nt, Artificial Sequence
  Description of Artificial Sequence: Synthetic oligonucleotide
  Antisense strand to SEQ ID NO: 2582634
aagauucuuugacacagcc

SEQ ID NO: 2582636 - RNA, 19 nt, Artificial Sequence
  Description of Artificial Sequence: Synthetic oligonucleotide
  Sense strand starting at position 2436 of SEQ ID NO: 1889167
auuggaauauagucugauc

SEQ ID NO: 2582637 - RNA, 19 nt, Artificial Sequence
  Description of Artificial Sequence: Synthetic oligonucleotide
  Antisense strand to SEQ ID NO: 2582636
gaucagacuauauuccaau

SEQ ID NO: 2582638 - RNA, 19 nt, Artificial Sequence
  Description of Artificial Sequence: Synthetic oligonucleotide
  Sense strand starting at position 2438 of SEQ ID NO: 1889167
uggaauauagucugaucag

SEQ ID NO: 2582639 - RNA, 19 nt, Artificial Sequence
  Description of Artificial Sequence: Synthetic oligonucleotide
  Antisense strand to SEQ ID NO: 2582638
cugaucagacuauauucca

SEQ ID NO: 2582640 - RNA, 19 nt, Artificial Sequence
  Description of Artificial Sequence: Synthetic oligonucleotide
  Sense strand starting at position 2684 of SEQ ID NO: 1889167
gccaacuguggugauuaca

SEQ ID NO: 2582641 - RNA, 19 nt, Artificial Sequence
  Description of Artificial Sequence: Synthetic oligonucleotide
  Antisense strand to SEQ ID NO: 2582640
uguaaucaccacaguuggc

SEQ ID NO: 2582642 - RNA, 19 nt, Artificial Sequence
  Description of Artificial Sequence: Synthetic oligonucleotide
  Sense strand starting at position 2743 of SEQ ID NO: 1889167
guggauucuccaugagaau

SEQ ID NO: 2582643 - RNA, 19 nt, Artificial Sequence
  Description of Artificial Sequence: Synthetic oligonucleotide
  Antisense strand to SEQ ID NO: 2582642
auucucauggagaauccac

SEQ ID NO: 2582644 - RNA, 19 nt, Artificial Sequence
  Description of Artificial Sequence: Synthetic oligonucleotide
  Sense strand starting at position 2993 of SEQ ID NO: 1889167
gcaacaacccaaugaaugu

SEQ ID NO: 2582645 - RNA, 19 nt, Artificial Sequence
  Description of Artificial Sequence: Synthetic oligonucleotide
  Antisense strand to SEQ ID NO: 2582644
acauucauuggguuguugc

SEQ ID NO: 2582646 - RNA, 19 nt, Artificial Sequence
  Description of Artificial Sequence: Synthetic oligonucleotide
  Sense strand starting at position 3121 of SEQ ID NO: 1889167
caauguaacugggugaaca

SEQ ID NO: 2582647 - RNA, 19 nt, Artificial Sequence
  Description of Artificial Sequence: Synthetic oligonucleotide
  Antisense strand to SEQ ID NO: 2582646
uguucacccaguuacauug

SEQ ID NO: 2582648 - RNA, 19 nt, Artificial Sequence
  Description of Artificial Sequence: Synthetic oligonucleotide
  Sense strand starting at position 3122 of SEQ ID NO: 1889167
aauguaacugggugaacaa

SEQ ID NO: 2582649 - RNA, 19 nt, Artificial Sequence
  Description of Artificial Sequence: Synthetic oligonucleotide
  Antisense strand to SEQ ID NO: 2582648
uuguucacccaguuacauu

SEQ ID NO: 2582650 - RNA, 19 nt, Artificial Sequence
  Description of Artificial Sequence: Synthetic oligonucleotide
  Sense strand starting at position 3135 of SEQ ID NO: 1889167
gaacaaguuuccuuguuga

SEQ ID NO: 2582651 - RNA, 19 nt, Artificial Sequence
  Description of Artificial Sequence: Synthetic oligonucleotide
  Antisense strand to SEQ ID NO: 2582650
ucaacaaggaaacuuguuc

SEQ ID NO: 2582652 - RNA, 19 nt, Artificial Sequence
  Description of Artificial Sequence: Synthetic oligonucleotide
  Sense strand starting at position 3215 of SEQ ID NO: 1889167
caguguuuagaaggaauca

SEQ ID NO: 2582653 - RNA, 19 nt, Artificial Sequence
  Description of Artificial Sequence: Synthetic oligonucleotide
  Antisense strand to SEQ ID NO: 2582652
ugauuccuucuaaacacug

SEQ ID NO: 2582654 - RNA, 19 nt, Artificial Sequence
  Description of Artificial Sequence: Synthetic oligonucleotide
  Sense strand starting at position 3404 of SEQ ID NO: 1889167
ccuauuuggcucuggguau

SEQ ID NO: 2582655 - RNA, 19 nt, Artificial Sequence
  Description of Artificial Sequence: Synthetic oligonucleotide
  Antisense strand to SEQ ID NO: 2582654
auacccagagccaaauagg

SEQ ID NO: 2582656 - RNA, 19 nt, Artificial Sequence
  Description of Artificial Sequence: Synthetic oligonucleotide
  Sense strand starting at position 3524 of SEQ ID NO: 1889167
ggacuaguuguacaguuaa

SEQ ID NO: 2582657 - RNA, 19 nt, Artificial Sequence
  Description of Artificial Sequence: Synthetic oligonucleotide
  Antisense strand to SEQ ID NO: 2582656
uuaacuguacaacuagucc

SEQ ID NO: 2582658 - RNA, 19 nt, Artificial Sequence
  Description of Artificial Sequence: Synthetic oligonucleotide
  Sense strand starting at position 3538 of SEQ ID NO: 1889167
guuaaaggaauguggguau

SEQ ID NO: 2582659 - RNA, 19 nt, Artificial Sequence
  Description of Artificial Sequence: Synthetic oligonucleotide
  Antisense strand to SEQ ID NO: 2582658
auacccacauuccuuuaac

SEQ ID NO: 2582660 - RNA, 19 nt, Artificial Sequence
  Description of Artificial Sequence: Synthetic oligonucleotide
  Sense strand starting at position 3563 of SEQ ID NO: 1889167
ggaagcaaauucucuguca

SEQ ID NO: 2582661 - RNA, 19 nt, Artificial Sequence
  Description of Artificial Sequence: Synthetic oligonucleotide
  Antisense strand to SEQ ID NO: 2582660
ugacagagaauuugcuucc

SEQ ID NO: 2582662 - RNA, 19 nt, Artificial Sequence
  Description of Artificial Sequence: Synthetic oligonucleotide
  Sense strand starting at position 3672 of SEQ ID NO: 1889167
cucacacucugucugagaa

SEQ ID NO: 2582663 - RNA, 19 nt, Artificial Sequence
  Description of Artificial Sequence: Synthetic oligonucleotide
  Antisense strand to SEQ ID NO: 2582662
uucucagacagagugugag

SEQ ID NO: 2582664 - RNA, 19 nt, Artificial Sequence
  Description of Artificial Sequence: Synthetic oligonucleotide
  Sense strand starting at position 3673 of SEQ ID NO: 1889167
ucacacucugucugagaau

SEQ ID NO: 2582665 - RNA, 19 nt, Artificial Sequence
  Description of Artificial Sequence: Synthetic oligonucleotide
  Antisense strand to SEQ ID NO: 2582664
auucucagacagaguguga

SEQ ID NO: 2582666 - RNA, 19 nt, Artificial Sequence
  Description of Artificial Sequence: Synthetic oligonucleotide
  Sense strand starting at position 3679 of SEQ ID NO: 1889167
ucugucugagaaugaaauc

SEQ ID NO: 2582667 - RNA, 19 nt, Artificial Sequence
  Description of Artificial Sequence: Synthetic oligonucleotide
  Antisense strand to SEQ ID NO: 2582666
gauuucauucucagacaga

SEQ ID NO: 2582668 - RNA, 19 nt, Artificial Sequence
  Description of Artificial Sequence: Synthetic oligonucleotide
  Sense strand starting at position 3808 of SEQ ID NO: 1889167
ccggauuggccucauuaca

SEQ ID NO: 2582669 - RNA, 19 nt, Artificial Sequence
  Description of Artificial Sequence: Synthetic oligonucleotide
  Antisense strand to SEQ ID NO: 2582668
uguaaugaggccaauccgg

SEQ ID NO: 2582670 - RNA, 19 nt, Artificial Sequence
  Description of Artificial Sequence: Synthetic oligonucleotide
  Sense strand starting at position 60 of SEQ ID NO: 1889168
augagaccagucuggcaaa

SEQ ID NO: 2582671 - RNA, 19 nt, Artificial Sequence
  Description of Artificial Sequence: Synthetic oligonucleotide
  Antisense strand to SEQ ID NO: 2582670
uuugccagacuggucucau

SEQ ID NO: 2582672 - RNA, 19 nt, Artificial Sequence
  Description of Artificial Sequence: Synthetic oligonucleotide
  Sense strand starting at position 118 of SEQ ID NO: 1889168
caggacaugugccuguaau

SEQ ID NO: 2582673 - RNA, 19 nt, Artificial Sequence
  Description of Artificial Sequence: Synthetic oligonucleotide
  Antisense strand to SEQ ID NO: 2582672
auuacaggcacauguccug

SEQ ID NO: 2582674 - RNA, 19 nt, Artificial Sequence
  Description of Artificial Sequence: Synthetic oligonucleotide
  Sense strand starting at position 526 of SEQ ID NO: 1889168
gaguccaugucccuguauu

SEQ ID NO: 2582675 - RNA, 19 nt, Artificial Sequence
  Description of Artificial Sequence: Synthetic oligonucleotide
  Antisense strand to SEQ ID NO: 2582674
aauacagggacauggacuc

SEQ ID NO: 2582676 - RNA, 19 nt, Artificial Sequence
  Description of Artificial Sequence: Synthetic oligonucleotide
  Sense strand starting at position 558 of SEQ ID NO: 1889168
uaacaauugccaggaguag

SEQ ID NO: 2582677 - RNA, 19 nt, Artificial Sequence
  Description of Artificial Sequence: Synthetic oligonucleotide
  Antisense strand to SEQ ID NO: 2582676
cuacuccuggcaauuguua

SEQ ID NO: 2582678 - RNA, 19 nt, Artificial Sequence
  Description of Artificial Sequence: Synthetic oligonucleotide
  Sense strand starting at position 971 of SEQ ID NO: 1889168
ccuccagauucccugugaa

SEQ ID NO: 2582679 - RNA, 19 nt, Artificial Sequence
  Description of Artificial Sequence: Synthetic oligonucleotide
  Antisense strand to SEQ ID NO: 2582678
uucacagggaaucuggagg

SEQ ID NO: 2582680 - RNA, 19 nt, Artificial Sequence
  Description of Artificial Sequence: Synthetic oligonucleotide
  Sense strand starting at position 974 of SEQ ID NO: 1889168
ccagauucccugugaagug

SEQ ID NO: 2582681 - RNA, 19 nt, Artificial Sequence
  Description of Artificial Sequence: Synthetic oligonucleotide
  Antisense strand to SEQ ID NO: 2582680
cacuucacagggaaucugg

SEQ ID NO: 2582682 - RNA, 19 nt, Artificial Sequence
  Description of Artificial Sequence: Synthetic oligonucleotide
  Sense strand starting at position 984 of SEQ ID NO: 1889168
ugugaaguggacugucuua

SEQ ID NO: 2582683 - RNA, 19 nt, Artificial Sequence
  Description of Artificial Sequence: Synthetic oligonucleotide
  Antisense strand to SEQ ID NO: 2582682
uaagacaguccacuucaca

SEQ ID NO: 2582684 - RNA, 19 nt, Artificial Sequence
  Description of Artificial Sequence: Synthetic oligonucleotide
  Sense strand starting at position 1016 of SEQ ID NO: 1889168
ggcaguuggagugaggaua

SEQ ID NO: 2582685 - RNA, 19 nt, Artificial Sequence
  Description of Artificial Sequence: Synthetic oligonucleotide
  Antisense strand to SEQ ID NO: 2582684
uauccucacuccaacugcc

SEQ ID NO: 2582686 - RNA, 19 nt, Artificial Sequence
  Description of Artificial Sequence: Synthetic oligonucleotide
  Sense strand starting at position 1096 of SEQ ID NO: 1889168
gagaaacauucugaaggaa

SEQ ID NO: 2582687 - RNA, 19 nt, Artificial Sequence
  Description of Artificial Sequence: Synthetic oligonucleotide
  Antisense strand to SEQ ID NO: 2582686
uuccuucagaauguuucuc

SEQ ID NO: 2582688 - RNA, 19 nt, Artificial Sequence
  Description of Artificial Sequence: Synthetic oligonucleotide
  Sense strand starting at position 1133 of SEQ ID NO: 1889168
ucagguggauaucugugua

SEQ ID NO: 2582689 - RNA, 19 nt, Artificial Sequence
  Description of Artificial Sequence: Synthetic oligonucleotide
  Antisense strand to SEQ ID NO: 2582688
uacacagauauccaccuga

SEQ ID NO: 2582690 - RNA, 19 nt, Artificial Sequence
  Description of Artificial Sequence: Synthetic oligonucleotide
  Sense strand starting at position 1136 of SEQ ID NO: 1889168
gguggauaucuguguagag

SEQ ID NO: 2582691 - RNA, 19 nt, Artificial Sequence
  Description of Artificial Sequence: Synthetic oligonucleotide
  Antisense strand to SEQ ID NO: 2582690
cucuacacagauauccacc

SEQ ID NO: 2582692 - RNA, 19 nt, Artificial Sequence
  Description of Artificial Sequence: Synthetic oligonucleotide
  Sense strand starting at position 1137 of SEQ ID NO: 1889168
guggauaucuguguagaga

SEQ ID NO: 2582693 - RNA, 19 nt, Artificial Sequence
  Description of Artificial Sequence: Synthetic oligonucleotide
  Antisense strand to SEQ ID NO: 2582692
ucucuacacagauauccac

SEQ ID NO: 2582694 - RNA, 19 nt, Artificial Sequence
  Description of Artificial Sequence: Synthetic oligonucleotide
  Sense strand starting at position 1156 of SEQ ID NO: 1889168
gggagaggguccuggauga

SEQ ID NO: 2582695 - RNA, 19 nt, Artificial Sequence
  Description of Artificial Sequence: Synthetic oligonucleotide
  Antisense strand to SEQ ID NO: 2582694
ucauccaggacccucuccc

SEQ ID NO: 2582696 - RNA, 19 nt, Artificial Sequence
  Description of Artificial Sequence: Synthetic oligonucleotide
  Sense strand starting at position 1220 of SEQ ID NO: 1889168
ggagcuggcaagugaugau

SEQ ID NO: 2582697 - RNA, 19 nt, Artificial Sequence
  Description of Artificial Sequence: Synthetic oligonucleotide
  Antisense strand to SEQ ID NO: 2582696
aucaucacuugccagcucc

SEQ ID NO: 2582698 - RNA, 19 nt, Artificial Sequence
  Description of Artificial Sequence: Synthetic oligonucleotide
  Sense strand starting at position 1290 of SEQ ID NO: 1889168
augcauuguaguggcuuaa

SEQ ID NO: 2582699 - RNA, 19 nt, Artificial Sequence
  Description of Artificial Sequence: Synthetic oligonucleotide
  Antisense strand to SEQ ID NO: 2582698
uuaagccacuacaaugcau

SEQ ID NO: 2582700 - RNA, 19 nt, Artificial Sequence
  Description of Artificial Sequence: Synthetic oligonucleotide
  Sense strand starting at position 1294 of SEQ ID NO: 1889168
auuguaguggcuuaagguu

SEQ ID NO: 2582701 - RNA, 19 nt, Artificial Sequence
  Description of Artificial Sequence: Synthetic oligonucleotide
  Antisense strand to SEQ ID NO: 2582700
aaccuuaagccacuacaau

SEQ ID NO: 2582702 - RNA, 19 nt, Artificial Sequence
  Description of Artificial Sequence: Synthetic oligonucleotide
  Sense strand starting at position 1321 of SEQ ID NO: 1889168
cugaaauguggguguugca

SEQ ID NO: 2582703 - RNA, 19 nt, Artificial Sequence
  Description of Artificial Sequence: Synthetic oligonucleotide
  Antisense strand to SEQ ID NO: 2582702
ugcaacacccacauuucag

SEQ ID NO: 2582704 - RNA, 19 nt, Artificial Sequence
  Description of Artificial Sequence: Synthetic oligonucleotide
  Sense strand starting at position 1380 of SEQ ID NO: 1889168
ugggauugcucauugcagu

SEQ ID NO: 2582705 - RNA, 19 nt, Artificial Sequence
  Description of Artificial Sequence: Synthetic oligonucleotide
  Antisense strand to SEQ ID NO: 2582704
acugcaaugagcaauccca

SEQ ID NO: 2582706 - RNA, 19 nt, Artificial Sequence
  Description of Artificial Sequence: Synthetic oligonucleotide
  Sense strand starting at position 1381 of SEQ ID NO: 1889168
gggauugcucauugcaguu

SEQ ID NO: 2582707 - RNA, 19 nt, Artificial Sequence
  Description of Artificial Sequence: Synthetic oligonucleotide
  Antisense strand to SEQ ID NO: 2582706
aacugcaaugagcaauccc

SEQ ID NO: 2582708 - RNA, 19 nt, Artificial Sequence
  Description of Artificial Sequence: Synthetic oligonucleotide
  Sense strand starting at position 1393 of SEQ ID NO: 1889168
ugcaguuuccugcaugauc

SEQ ID NO: 2582709 - RNA, 19 nt, Artificial Sequence
  Description of Artificial Sequence: Synthetic oligonucleotide
  Antisense strand to SEQ ID NO: 2582708
gaucaugcaggaaacugca

SEQ ID NO: 2582710 - RNA, 19 nt, Artificial Sequence
  Description of Artificial Sequence: Synthetic oligonucleotide
  Sense strand starting at position 1401 of SEQ ID NO: 1889168
ccugcaugauccuuggguu

SEQ ID NO: 2582711 - RNA, 19 nt, Artificial Sequence
  Description of Artificial Sequence: Synthetic oligonucleotide
  Antisense strand to SEQ ID NO: 2582710
aacccaaggaucaugcagg

SEQ ID NO: 2582712 - RNA, 19 nt, Artificial Sequence
  Description of Artificial Sequence: Synthetic oligonucleotide
  Sense strand starting at position 1484 of SEQ ID NO: 1889168
ggccucuguucccucuaaa

SEQ ID NO: 2582713 - RNA, 19 nt, Artificial Sequence
  Description of Artificial Sequence: Synthetic oligonucleotide
  Antisense strand to SEQ ID NO: 2582712
uuuagagggaacagaggcc

SEQ ID NO: 2582714 - RNA, 19 nt, Artificial Sequence
  Description of Artificial Sequence: Synthetic oligonucleotide
  Sense strand starting at position 1803 of SEQ ID NO: 1889168
acugcaguggaaugagaua

SEQ ID NO: 2582715 - RNA, 19 nt, Artificial Sequence
  Description of Artificial Sequence: Synthetic oligonucleotide
  Antisense strand to SEQ ID NO: 2582714
uaucucauuccacugcagu

SEQ ID NO: 2582716 - RNA, 19 nt, Artificial Sequence
  Description of Artificial Sequence: Synthetic oligonucleotide
  Sense strand starting at position 1917 of SEQ ID NO: 1889168
cgaggaugccaaugcagua

SEQ ID NO: 2582717 - RNA, 19 nt, Artificial Sequence
  Description of Artificial Sequence: Synthetic oligonucleotide
  Antisense strand to SEQ ID NO: 2582716
uacugcauuggcauccucg

SEQ ID NO: 2582718 - RNA, 19 nt, Artificial Sequence
  Description of Artificial Sequence: Synthetic oligonucleotide
  Sense strand starting at position 2105 of SEQ ID NO: 1889168
gcuggagugaagcaugaau

SEQ ID NO: 2582719 - RNA, 19 nt, Artificial Sequence
  Description of Artificial Sequence: Synthetic oligonucleotide
  Antisense strand to SEQ ID NO: 2582718
auucaugcuucacuccagc

SEQ ID NO: 2582720 - RNA, 19 nt, Artificial Sequence
  Description of Artificial Sequence: Synthetic oligonucleotide
  Sense strand starting at position 2268 of SEQ ID NO: 1889168
caacaucuggugugccaaa

SEQ ID NO: 2582721 - RNA, 19 nt, Artificial Sequence
  Description of Artificial Sequence: Synthetic oligonucleotide
  Antisense strand to SEQ ID NO: 2582720
uuuggcacaccagauguug

SEQ ID NO: 2582722 - RNA, 19 nt, Artificial Sequence
  Description of Artificial Sequence: Synthetic oligonucleotide
  Sense strand starting at position 2289 of SEQ ID NO: 1889168
aucuacaucuggucaagga

SEQ ID NO: 2582723 - RNA, 19 nt, Artificial Sequence
  Description of Artificial Sequence: Synthetic oligonucleotide
  Antisense strand to SEQ ID NO: 2582722
uccuugaccagauguagau

SEQ ID NO: 2582724 - RNA, 19 nt, Artificial Sequence
  Description of Artificial Sequence: Synthetic oligonucleotide
  Sense strand starting at position 2312 of SEQ ID NO: 1889168
ccagaugauucagugggca

SEQ ID NO: 2582725 - RNA, 19 nt, Artificial Sequence
  Description of Artificial Sequence: Synthetic oligonucleotide
  Antisense strand to SEQ ID NO: 2582724
ugcccacugaaucaucugg

SEQ ID NO: 2582726 - RNA, 19 nt, Artificial Sequence
  Description of Artificial Sequence: Synthetic oligonucleotide
  Sense strand starting at position 2346 of SEQ ID NO: 1889168
gcaauucugcaagagcaca

SEQ ID NO: 2582727 - RNA, 19 nt, Artificial Sequence
  Description of Artificial Sequence: Synthetic oligonucleotide
  Antisense strand to SEQ ID NO: 2582726
ugugcucuugcagaauugc

SEQ ID NO: 2582728 - RNA, 19 nt, Artificial Sequence
  Description of Artificial Sequence: Synthetic oligonucleotide
  Sense strand starting at position 2378 of SEQ ID NO: 1889168
agggauaucucccagacau

SEQ ID NO: 2582729 - RNA, 19 nt, Artificial Sequence
  Description of Artificial Sequence: Synthetic oligonucleotide
  Antisense strand to SEQ ID NO: 2582728
augucugggagauaucccu

SEQ ID NO: 2582730 - RNA, 19 nt, Artificial Sequence
  Description of Artificial Sequence: Synthetic oligonucleotide
  Sense strand starting at position 2413 of SEQ ID NO: 1889168
cgauguugauccucuguuu

SEQ ID NO: 2582731 - RNA, 19 nt, Artificial Sequence
  Description of Artificial Sequence: Synthetic oligonucleotide
  Antisense strand to SEQ ID NO: 2582730
aaacagaggaucaacaucg

SEQ ID NO: 2582732 - RNA, 19 nt, Artificial Sequence
  Description of Artificial Sequence: Synthetic oligonucleotide
  Sense strand starting at position 2424 of SEQ ID NO: 1889168
cucuguuucugucugguga

SEQ ID NO: 2582733 - RNA, 19 nt, Artificial Sequence
  Description of Artificial Sequence: Synthetic oligonucleotide
  Antisense strand to SEQ ID NO: 2582732
ucaccagacagaaacagag

SEQ ID NO: 2582734 - RNA, 19 nt, Artificial Sequence
  Description of Artificial Sequence: Synthetic oligonucleotide
  Sense strand starting at position 2661 of SEQ ID NO: 1889168
guguguggugucuucuuau

SEQ ID NO: 2582735 - RNA, 19 nt, Artificial Sequence
  Description of Artificial Sequence: Synthetic oligonucleotide
  Antisense strand to SEQ ID NO: 2582734
auaagaagacaccacacac

SEQ ID NO: 2582736 - RNA, 19 nt, Artificial Sequence
  Description of Artificial Sequence: Synthetic oligonucleotide
  Sense strand starting at position 2667 of SEQ ID NO: 1889168
ggugucuucuuauccuagu

SEQ ID NO: 2582737 - RNA, 19 nt, Artificial Sequence
  Description of Artificial Sequence: Synthetic oligonucleotide
  Antisense strand to SEQ ID NO: 2582736
acuaggauaagaagacacc

SEQ ID NO: 2582738 - RNA, 19 nt, Artificial Sequence
  Description of Artificial Sequence: Synthetic oligonucleotide
  Sense strand starting at position 2699 of SEQ ID NO: 1889168
ggaccugucugccugagga

SEQ ID NO: 2582739 - RNA, 19 nt, Artificial Sequence
  Description of Artificial Sequence: Synthetic oligonucleotide
  Antisense strand to SEQ ID NO: 2582738
uccucaggcagacaggucc

SEQ ID NO: 2582740 - RNA, 19 nt, Artificial Sequence
  Description of Artificial Sequence: Synthetic oligonucleotide
  Sense strand starting at position 2713 of SEQ ID NO: 1889168
gaggaagcccuguaguuag

SEQ ID NO: 2582741 - RNA, 19 nt, Artificial Sequence
  Description of Artificial Sequence: Synthetic oligonucleotide
  Antisense strand to SEQ ID NO: 2582740
cuaacuacagggcuuccuc

SEQ ID NO: 2582742 - RNA, 19 nt, Artificial Sequence
  Description of Artificial Sequence: Synthetic oligonucleotide
  Sense strand starting at position 3010 of SEQ ID NO: 1889168
ccaggacauucccagggaa

SEQ ID NO: 2582743 - RNA, 19 nt, Artificial Sequence
  Description of Artificial Sequence: Synthetic oligonucleotide
  Antisense strand to SEQ ID NO: 2582742
uucccugggaauguccugg

SEQ ID NO: 2582744 - RNA, 19 nt, Artificial Sequence
  Description of Artificial Sequence: Synthetic oligonucleotide
  Sense strand starting at position 3371 of SEQ ID NO: 1889168
ggagucuaccuccaaguga

SEQ ID NO: 2582745 - RNA, 19 nt, Artificial Sequence
  Description of Artificial Sequence: Synthetic oligonucleotide
  Antisense strand to SEQ ID NO: 2582744
ucacuuggagguagacucc

SEQ ID NO: 2582746 - RNA, 19 nt, Artificial Sequence
  Description of Artificial Sequence: Synthetic oligonucleotide
  Sense strand starting at position 3474 of SEQ ID NO: 1889168
acgucagucuccuccucaa

SEQ ID NO: 2582747 - RNA, 19 nt, Artificial Sequence
  Description of Artificial Sequence: Synthetic oligonucleotide
  Antisense strand to SEQ ID NO: 2582746
uugaggaggagacugacgu

SEQ ID NO: 2582748 - RNA, 19 nt, Artificial Sequence
  Description of Artificial Sequence: Synthetic oligonucleotide
  Sense strand starting at position 3510 of SEQ ID NO: 1889168
gccauuaugucuuccaccu

SEQ ID NO: 2582749 - RNA, 19 nt, Artificial Sequence
  Description of Artificial Sequence: Synthetic oligonucleotide
  Antisense strand to SEQ ID NO: 2582748
agguggaagacauaauggc

SEQ ID NO: 2582750 - RNA, 19 nt, Artificial Sequence
  Description of Artificial Sequence: Synthetic oligonucleotide
  Sense strand starting at position 61 of SEQ ID NO: 1889169
augagaccagucuggcaaa

SEQ ID NO: 2582751 - RNA, 19 nt, Artificial Sequence
  Description of Artificial Sequence: Synthetic oligonucleotide
  Antisense strand to SEQ ID NO: 2582750
uuugccagacuggucucau

SEQ ID NO: 2582752 - RNA, 19 nt, Artificial Sequence
  Description of Artificial Sequence: Synthetic oligonucleotide
  Sense strand starting at position 119 of SEQ ID NO: 1889169
caggacaugugccuguaau

SEQ ID NO: 2582753 - RNA, 19 nt, Artificial Sequence
  Description of Artificial Sequence: Synthetic oligonucleotide
  Antisense strand to SEQ ID NO: 2582752
auuacaggcacauguccug

SEQ ID NO: 2582754 - RNA, 19 nt, Artificial Sequence
  Description of Artificial Sequence: Synthetic oligonucleotide
  Sense strand starting at position 120 of SEQ ID NO: 1889169
aggacaugugccuguaauc

SEQ ID NO: 2582755 - RNA, 19 nt, Artificial Sequence
  Description of Artificial Sequence: Synthetic oligonucleotide
  Antisense strand to SEQ ID NO: 2582754
gauuacaggcacauguccu

SEQ ID NO: 2582756 - RNA, 19 nt, Artificial Sequence
  Description of Artificial Sequence: Synthetic oligonucleotide
  Sense strand starting at position 527 of SEQ ID NO: 1889169
gaguccaugucccuguauu

SEQ ID NO: 2582757 - RNA, 19 nt, Artificial Sequence
  Description of Artificial Sequence: Synthetic oligonucleotide
  Antisense strand to SEQ ID NO: 2582756
aauacagggacauggacuc

SEQ ID NO: 2582758 - RNA, 19 nt, Artificial Sequence
  Description of Artificial Sequence: Synthetic oligonucleotide
  Sense strand starting at position 559 of SEQ ID NO: 1889169
uaacaauugccaggaguag

SEQ ID NO: 2582759 - RNA, 19 nt, Artificial Sequence
  Description of Artificial Sequence: Synthetic oligonucleotide
  Antisense strand to SEQ ID NO: 2582758
cuacuccuggcaauuguua

SEQ ID NO: 2582760 - RNA, 19 nt, Artificial Sequence
  Description of Artificial Sequence: Synthetic oligonucleotide
  Sense strand starting at position 643 of SEQ ID NO: 1889169
aauggauccuucugcaguu

SEQ ID NO: 2582761 - RNA, 19 nt, Artificial Sequence
  Description of Artificial Sequence: Synthetic oligonucleotide
  Antisense strand to SEQ ID NO: 2582760
aacugcagaaggauccauu

SEQ ID NO: 2582762 - RNA, 19 nt, Artificial Sequence
  Description of Artificial Sequence: Synthetic oligonucleotide
  Sense strand starting at position 1134 of SEQ ID NO: 1889169
ucagguggauaucugugua

SEQ ID NO: 2582763 - RNA, 19 nt, Artificial Sequence
  Description of Artificial Sequence: Synthetic oligonucleotide
  Antisense strand to SEQ ID NO: 2582762
uacacagauauccaccuga

SEQ ID NO: 2582764 - RNA, 19 nt, Artificial Sequence
  Description of Artificial Sequence: Synthetic oligonucleotide
  Sense strand starting at position 1137 of SEQ ID NO: 1889169
gguggauaucuguguagag

SEQ ID NO: 2582765 - RNA, 19 nt, Artificial Sequence
  Description of Artificial Sequence: Synthetic oligonucleotide
  Antisense strand to SEQ ID NO: 2582764
cucuacacagauauccacc

SEQ ID NO: 2582766 - RNA, 19 nt, Artificial Sequence
  Description of Artificial Sequence: Synthetic oligonucleotide
  Sense strand starting at position 1138 of SEQ ID NO: 1889169
guggauaucuguguagaga

SEQ ID NO: 2582767 - RNA, 19 nt, Artificial Sequence
  Description of Artificial Sequence: Synthetic oligonucleotide
  Antisense strand to SEQ ID NO: 2582766
ucucuacacagauauccac

SEQ ID NO: 2582768 - RNA, 19 nt, Artificial Sequence
  Description of Artificial Sequence: Synthetic oligonucleotide
  Sense strand starting at position 1157 of SEQ ID NO: 1889169
gggagaggguccuggauga

SEQ ID NO: 2582769 - RNA, 19 nt, Artificial Sequence
  Description of Artificial Sequence: Synthetic oligonucleotide
  Antisense strand to SEQ ID NO: 2582768
ucauccaggacccucuccc

SEQ ID NO: 2582770 - RNA, 19 nt, Artificial Sequence
  Description of Artificial Sequence: Synthetic oligonucleotide
  Sense strand starting at position 1181 of SEQ ID NO: 1889169
aacugagucucagguggua

SEQ ID NO: 2582771 - RNA, 19 nt, Artificial Sequence
  Description of Artificial Sequence: Synthetic oligonucleotide
  Antisense strand to SEQ ID NO: 2582770
uaccaccugagacucaguu

SEQ ID NO: 2582772 - RNA, 19 nt, Artificial Sequence
  Description of Artificial Sequence: Synthetic oligonucleotide
  Sense strand starting at position 1291 of SEQ ID NO: 1889169
augcauuguaguggcuuaa

SEQ ID NO: 2582773 - RNA, 19 nt, Artificial Sequence
  Description of Artificial Sequence: Synthetic oligonucleotide
  Antisense strand to SEQ ID NO: 2582772
uuaagccacuacaaugcau

SEQ ID NO: 2582774 - RNA, 19 nt, Artificial Sequence
  Description of Artificial Sequence: Synthetic oligonucleotide
  Sense strand starting at position 1295 of SEQ ID NO: 1889169
auuguaguggcuuaagguu

SEQ ID NO: 2582775 - RNA, 19 nt, Artificial Sequence
  Description of Artificial Sequence: Synthetic oligonucleotide
  Antisense strand to SEQ ID NO: 2582774
aaccuuaagccacuacaau

SEQ ID NO: 2582776 - RNA, 19 nt, Artificial Sequence
  Description of Artificial Sequence: Synthetic oligonucleotide
  Sense strand starting at position 1381 of SEQ ID NO: 1889169
ugggauugcucauugcagu

SEQ ID NO: 2582777 - RNA, 19 nt, Artificial Sequence
  Description of Artificial Sequence: Synthetic oligonucleotide
  Antisense strand to SEQ ID NO: 2582776
acugcaaugagcaauccca

SEQ ID NO: 2582778 - RNA, 19 nt, Artificial Sequence
  Description of Artificial Sequence: Synthetic oligonucleotide
  Sense strand starting at position 1382 of SEQ ID NO: 1889169
gggauugcucauugcaguu

SEQ ID NO: 2582779 - RNA, 19 nt, Artificial Sequence
  Description of Artificial Sequence: Synthetic oligonucleotide
  Antisense strand to SEQ ID NO: 2582778
aacugcaaugagcaauccc

SEQ ID NO: 2582780 - RNA, 19 nt, Artificial Sequence
  Description of Artificial Sequence: Synthetic oligonucleotide
  Sense strand starting at position 1394 of SEQ ID NO: 1889169
ugcaguuuccugcaugauc

SEQ ID NO: 2582781 - RNA, 19 nt, Artificial Sequence
  Description of Artificial Sequence: Synthetic oligonucleotide
  Antisense strand to SEQ ID NO: 2582780
gaucaugcaggaaacugca

SEQ ID NO: 2582782 - RNA, 19 nt, Artificial Sequence
  Description of Artificial Sequence: Synthetic oligonucleotide
  Sense strand starting at position 1402 of SEQ ID NO: 1889169
ccugcaugauccuuggguu

SEQ ID NO: 2582783 - RNA, 19 nt, Artificial Sequence
  Description of Artificial Sequence: Synthetic oligonucleotide
  Antisense strand to SEQ ID NO: 2582782
aacccaaggaucaugcagg

SEQ ID NO: 2582784 - RNA, 19 nt, Artificial Sequence
  Description of Artificial Sequence: Synthetic oligonucleotide
  Sense strand starting at position 1604 of SEQ ID NO: 1889169
gucacaguuuaaugccaau

SEQ ID NO: 2582785 - RNA, 19 nt, Artificial Sequence
  Description of Artificial Sequence: Synthetic oligonucleotide
  Antisense strand to SEQ ID NO: 2582784
auuggcauuaaacugugac

SEQ ID NO: 2582786 - RNA, 19 nt, Artificial Sequence
  Description of Artificial Sequence: Synthetic oligonucleotide
  Sense strand starting at position 1648 of SEQ ID NO: 1889169
cgagguccuuucccaugau

SEQ ID NO: 2582787 - RNA, 19 nt, Artificial Sequence
  Description of Artificial Sequence: Synthetic oligonucleotide
  Antisense strand to SEQ ID NO: 2582786
aucaugggaaaggaccucg

SEQ ID NO: 2582788 - RNA, 19 nt, Artificial Sequence
  Description of Artificial Sequence: Synthetic oligonucleotide
  Sense strand starting at position 1918 of SEQ ID NO: 1889169
cgaggaugccaaugcagua

SEQ ID NO: 2582789 - RNA, 19 nt, Artificial Sequence
  Description of Artificial Sequence: Synthetic oligonucleotide
  Antisense strand to SEQ ID NO: 2582788
uacugcauuggcauccucg

SEQ ID NO: 2582790 - RNA, 19 nt, Artificial Sequence
  Description of Artificial Sequence: Synthetic oligonucleotide
  Sense strand starting at position 2269 of SEQ ID NO: 1889169
caacaucuggugugccaaa

SEQ ID NO: 2582791 - RNA, 19 nt, Artificial Sequence
  Description of Artificial Sequence: Synthetic oligonucleotide
  Antisense strand to SEQ ID NO: 2582790
uuuggcacaccagauguug

SEQ ID NO: 2582792 - RNA, 19 nt, Artificial Sequence
  Description of Artificial Sequence: Synthetic oligonucleotide
  Sense strand starting at position 2290 of SEQ ID NO: 1889169
aucuacaucuggucaagga

SEQ ID NO: 2582793 - RNA, 19 nt, Artificial Sequence
  Description of Artificial Sequence: Synthetic oligonucleotide
  Antisense strand to SEQ ID NO: 2582792
uccuugaccagauguagau

SEQ ID NO: 2582794 - RNA, 19 nt, Artificial Sequence
  Description of Artificial Sequence: Synthetic oligonucleotide
  Sense strand starting at position 2313 of SEQ ID NO: 1889169
ccagaugauucagugggca

SEQ ID NO: 2582795 - RNA, 19 nt, Artificial Sequence
  Description of Artificial Sequence: Synthetic oligonucleotide
  Antisense strand to SEQ ID NO: 2582794
ugcccacugaaucaucugg

SEQ ID NO: 2582796 - RNA, 19 nt, Artificial Sequence
  Description of Artificial Sequence: Synthetic oligonucleotide
  Sense strand starting at position 2347 of SEQ ID NO: 1889169
gcaauucugcaagagcaca

SEQ ID NO: 2582797 - RNA, 19 nt, Artificial Sequence
  Description of Artificial Sequence: Synthetic oligonucleotide
  Antisense strand to SEQ ID NO: 2582796
ugugcucuugcagaauugc

SEQ ID NO: 2582798 - RNA, 19 nt, Artificial Sequence
  Description of Artificial Sequence: Synthetic oligonucleotide
  Sense strand starting at position 2379 of SEQ ID NO: 1889169
agggauaucucccagacau

SEQ ID NO: 2582799 - RNA, 19 nt, Artificial Sequence
  Description of Artificial Sequence: Synthetic oligonucleotide
  Antisense strand to SEQ ID NO: 2582798
augucugggagauaucccu

SEQ ID NO: 2582800 - RNA, 19 nt, Artificial Sequence
  Description of Artificial Sequence: Synthetic oligonucleotide
  Sense strand starting at position 2414 of SEQ ID NO: 1889169
cgauguugauccucuguuu

SEQ ID NO: 2582801 - RNA, 19 nt, Artificial Sequence
  Description of Artificial Sequence: Synthetic oligonucleotide
  Antisense strand to SEQ ID NO: 2582800
aaacagaggaucaacaucg

SEQ ID NO: 2582802 - RNA, 19 nt, Artificial Sequence
  Description of Artificial Sequence: Synthetic oligonucleotide
  Sense strand starting at position 2425 of SEQ ID NO: 1889169
cucuguuucugucugguga

SEQ ID NO: 2582803 - RNA, 19 nt, Artificial Sequence
  Description of Artificial Sequence: Synthetic oligonucleotide
  Antisense strand to SEQ ID NO: 2582802
ucaccagacagaaacagag

SEQ ID NO: 2582804 - RNA, 19 nt, Artificial Sequence
  Description of Artificial Sequence: Synthetic oligonucleotide
  Sense strand starting at position 2429 of SEQ ID NO: 1889169
guuucugucuggugaggag

SEQ ID NO: 2582805 - RNA, 19 nt, Artificial Sequence
  Description of Artificial Sequence: Synthetic oligonucleotide
  Antisense strand to SEQ ID NO: 2582804
cuccucaccagacagaaac

SEQ ID NO: 2582806 - RNA, 19 nt, Artificial Sequence
  Description of Artificial Sequence: Synthetic oligonucleotide
  Sense strand starting at position 2660 of SEQ ID NO: 1889169
ggguguguggugucuucuu

SEQ ID NO: 2582807 - RNA, 19 nt, Artificial Sequence
  Description of Artificial Sequence: Synthetic oligonucleotide
  Antisense strand to SEQ ID NO: 2582806
aagaagacaccacacaccc

SEQ ID NO: 2582808 - RNA, 19 nt, Artificial Sequence
  Description of Artificial Sequence: Synthetic oligonucleotide
  Sense strand starting at position 2662 of SEQ ID NO: 1889169
guguguggugucuucuuau

SEQ ID NO: 2582809 - RNA, 19 nt, Artificial Sequence
  Description of Artificial Sequence: Synthetic oligonucleotide
  Antisense strand to SEQ ID NO: 2582808
auaagaagacaccacacac

SEQ ID NO: 2582810 - RNA, 19 nt, Artificial Sequence
  Description of Artificial Sequence: Synthetic oligonucleotide
  Sense strand starting at position 2668 of SEQ ID NO: 1889169
ggugucuucuuauccuagu

SEQ ID NO: 2582811 - RNA, 19 nt, Artificial Sequence
  Description of Artificial Sequence: Synthetic oligonucleotide
  Antisense strand to SEQ ID NO: 2582810
acuaggauaagaagacacc

SEQ ID NO: 2582812 - RNA, 19 nt, Artificial Sequence
  Description of Artificial Sequence: Synthetic oligonucleotide
  Sense strand starting at position 2700 of SEQ ID NO: 1889169
ggaccugucugccugagga

SEQ ID NO: 2582813 - RNA, 19 nt, Artificial Sequence
  Description of Artificial Sequence: Synthetic oligonucleotide
  Antisense strand to SEQ ID NO: 2582812
uccucaggcagacaggucc

SEQ ID NO: 2582814 - RNA, 19 nt, Artificial Sequence
  Description of Artificial Sequence: Synthetic oligonucleotide
  Sense strand starting at position 2714 of SEQ ID NO: 1889169
gaggaagcccuguaguuag

SEQ ID NO: 2582815 - RNA, 19 nt, Artificial Sequence
  Description of Artificial Sequence: Synthetic oligonucleotide
  Antisense strand to SEQ ID NO: 2582814
cuaacuacagggcuuccuc

SEQ ID NO: 2582816 - RNA, 19 nt, Artificial Sequence
  Description of Artificial Sequence: Synthetic oligonucleotide
  Sense strand starting at position 3011 of SEQ ID NO: 1889169
ccaggacauucccagggaa

SEQ ID NO: 2582817 - RNA, 19 nt, Artificial Sequence
  Description of Artificial Sequence: Synthetic oligonucleotide
  Antisense strand to SEQ ID NO: 2582816
uucccugggaauguccugg

SEQ ID NO: 2582818 - RNA, 19 nt, Artificial Sequence
  Description of Artificial Sequence: Synthetic oligonucleotide
  Sense strand starting at position 3041 of SEQ ID NO: 1889169
gacauugugcugugcguga

SEQ ID NO: 2582819 - RNA, 19 nt, Artificial Sequence
  Description of Artificial Sequence: Synthetic oligonucleotide
  Antisense strand to SEQ ID NO: 2582818
ucacgcacagcacaauguc

SEQ ID NO: 2582820 - RNA, 19 nt, Artificial Sequence
  Description of Artificial Sequence: Synthetic oligonucleotide
  Sense strand starting at position 3073 of SEQ ID NO: 1889169
ccgcgauucucccuuguga

SEQ ID NO: 2582821 - RNA, 19 nt, Artificial Sequence
  Description of Artificial Sequence: Synthetic oligonucleotide
  Antisense strand to SEQ ID NO: 2582820
ucacaagggagaaucgcgg

SEQ ID NO: 2582822 - RNA, 19 nt, Artificial Sequence
  Description of Artificial Sequence: Synthetic oligonucleotide
  Sense strand starting at position 3075 of SEQ ID NO: 1889169
gcgauucucccuugugagu

SEQ ID NO: 2582823 - RNA, 19 nt, Artificial Sequence
  Description of Artificial Sequence: Synthetic oligonucleotide
  Antisense strand to SEQ ID NO: 2582822
acucacaagggagaaucgc

SEQ ID NO: 2582824 - RNA, 19 nt, Artificial Sequence
  Description of Artificial Sequence: Synthetic oligonucleotide
  Sense strand starting at position 3372 of SEQ ID NO: 1889169
ggagucuaccuccaaguga

SEQ ID NO: 2582825 - RNA, 19 nt, Artificial Sequence
  Description of Artificial Sequence: Synthetic oligonucleotide
  Antisense strand to SEQ ID NO: 2582824
ucacuuggagguagacucc

SEQ ID NO: 2582826 - RNA, 19 nt, Artificial Sequence
  Description of Artificial Sequence: Synthetic oligonucleotide
  Sense strand starting at position 3475 of SEQ ID NO: 1889169
acgucagucuccuccucaa

SEQ ID NO: 2582827 - RNA, 19 nt, Artificial Sequence
  Description of Artificial Sequence: Synthetic oligonucleotide
  Antisense strand to SEQ ID NO: 2582826
uugaggaggagacugacgu

SEQ ID NO: 2582828 - RNA, 19 nt, Artificial Sequence
  Description of Artificial Sequence: Synthetic oligonucleotide
  Sense strand starting at position 3511 of SEQ ID NO: 1889169
gccauuaugucuuccaccu

SEQ ID NO: 2582829 - RNA, 19 nt, Artificial Sequence
  Description of Artificial Sequence: Synthetic oligonucleotide
  Antisense strand to SEQ ID NO: 2582828
agguggaagacauaauggc

SEQ ID NO: 2582830 - RNA, 19 nt, Artificial Sequence
  Description of Artificial Sequence: Synthetic oligonucleotide
  Sense strand starting at position 60 of SEQ ID NO: 1889170
augagaccagucuggcaaa

SEQ ID NO: 2582831 - RNA, 19 nt, Artificial Sequence
  Description of Artificial Sequence: Synthetic oligonucleotide
  Antisense strand to SEQ ID NO: 2582830
uuugccagacuggucucau

SEQ ID NO: 2582832 - RNA, 19 nt, Artificial Sequence
  Description of Artificial Sequence: Synthetic oligonucleotide
  Sense strand starting at position 118 of SEQ ID NO: 1889170
caggacaugugccuguaau

SEQ ID NO: 2582833 - RNA, 19 nt, Artificial Sequence
  Description of Artificial Sequence: Synthetic oligonucleotide
  Antisense strand to SEQ ID NO: 2582832
auuacaggcacauguccug

SEQ ID NO: 2582834 - RNA, 19 nt, Artificial Sequence
  Description of Artificial Sequence: Synthetic oligonucleotide
  Sense strand starting at position 526 of SEQ ID NO: 1889170
gaguccaugucccuguauu

SEQ ID NO: 2582835 - RNA, 19 nt, Artificial Sequence
  Description of Artificial Sequence: Synthetic oligonucleotide
  Antisense strand to SEQ ID NO: 2582834
aauacagggacauggacuc

SEQ ID NO: 2582836 - RNA, 19 nt, Artificial Sequence
  Description of Artificial Sequence: Synthetic oligonucleotide
  Sense strand starting at position 558 of SEQ ID NO: 1889170
uaacaauugccaggaguag

SEQ ID NO: 2582837 - RNA, 19 nt, Artificial Sequence
  Description of Artificial Sequence: Synthetic oligonucleotide
  Antisense strand to SEQ ID NO: 2582836
cuacuccuggcaauuguua

SEQ ID NO: 2582838 - RNA, 19 nt, Artificial Sequence
  Description of Artificial Sequence: Synthetic oligonucleotide
  Sense strand starting at position 971 of SEQ ID NO: 1889170
ccuccagauucccugugaa

SEQ ID NO: 2582839 - RNA, 19 nt, Artificial Sequence
  Description of Artificial Sequence: Synthetic oligonucleotide
  Antisense strand to SEQ ID NO: 2582838
uucacagggaaucuggagg

SEQ ID NO: 2582840 - RNA, 19 nt, Artificial Sequence
  Description of Artificial Sequence: Synthetic oligonucleotide
  Sense strand starting at position 974 of SEQ ID NO: 1889170
ccagauucccugugaagug

SEQ ID NO: 2582841 - RNA, 19 nt, Artificial Sequence
  Description of Artificial Sequence: Synthetic oligonucleotide
  Antisense strand to SEQ ID NO: 2582840
cacuucacagggaaucugg

SEQ ID NO: 2582842 - RNA, 19 nt, Artificial Sequence
  Description of Artificial Sequence: Synthetic oligonucleotide
  Sense strand starting at position 984 of SEQ ID NO: 1889170
ugugaaguggacugucuua

SEQ ID NO: 2582843 - RNA, 19 nt, Artificial Sequence
  Description of Artificial Sequence: Synthetic oligonucleotide
  Antisense strand to SEQ ID NO: 2582842
uaagacaguccacuucaca

SEQ ID NO: 2582844 - RNA, 19 nt, Artificial Sequence
  Description of Artificial Sequence: Synthetic oligonucleotide
  Sense strand starting at position 1016 of SEQ ID NO: 1889170
ggcaguuggagugaggaua

SEQ ID NO: 2582845 - RNA, 19 nt, Artificial Sequence
  Description of Artificial Sequence: Synthetic oligonucleotide
  Antisense strand to SEQ ID NO: 2582844
uauccucacuccaacugcc

SEQ ID NO: 2582846 - RNA, 19 nt, Artificial Sequence
  Description of Artificial Sequence: Synthetic oligonucleotide
  Sense strand starting at position 1096 of SEQ ID NO: 1889170
gagaaacauucugaaggaa

SEQ ID NO: 2582847 - RNA, 19 nt, Artificial Sequence
  Description of Artificial Sequence: Synthetic oligonucleotide
  Antisense strand to SEQ ID NO: 2582846
uuccuucagaauguuucuc

SEQ ID NO: 2582848 - RNA, 19 nt, Artificial Sequence
  Description of Artificial Sequence: Synthetic oligonucleotide
  Sense strand starting at position 1133 of SEQ ID NO: 1889170
ucagguggauaucugugua

SEQ ID NO: 2582849 - RNA, 19 nt, Artificial Sequence
  Description of Artificial Sequence: Synthetic oligonucleotide
  Antisense strand to SEQ ID NO: 2582848
uacacagauauccaccuga

SEQ ID NO: 2582850 - RNA, 19 nt, Artificial Sequence
  Description of Artificial Sequence: Synthetic oligonucleotide
  Sense strand starting at position 1136 of SEQ ID NO: 1889170
gguggauaucuguguagag

SEQ ID NO: 2582851 - RNA, 19 nt, Artificial Sequence
  Description of Artificial Sequence: Synthetic oligonucleotide
  Antisense strand to SEQ ID NO: 2582850
cucuacacagauauccacc

SEQ ID NO: 2582852 - RNA, 19 nt, Artificial Sequence
  Description of Artificial Sequence: Synthetic oligonucleotide
  Sense strand starting at position 1137 of SEQ ID NO: 1889170
guggauaucuguguagaga

SEQ ID NO: 2582853 - RNA, 19 nt, Artificial Sequence
  Description of Artificial Sequence: Synthetic oligonucleotide
  Antisense strand to SEQ ID NO: 2582852
ucucuacacagauauccac

SEQ ID NO: 2582854 - RNA, 19 nt, Artificial Sequence
  Description of Artificial Sequence: Synthetic oligonucleotide
  Sense strand starting at position 1156 of SEQ ID NO: 1889170
gggagaggguccuggauga

SEQ ID NO: 2582855 - RNA, 19 nt, Artificial Sequence
  Description of Artificial Sequence: Synthetic oligonucleotide
  Antisense strand to SEQ ID NO: 2582854
ucauccaggacccucuccc

SEQ ID NO: 2582856 - RNA, 19 nt, Artificial Sequence
  Description of Artificial Sequence: Synthetic oligonucleotide
  Sense strand starting at position 1220 of SEQ ID NO: 1889170
ggagcuggcaagugaugau

SEQ ID NO: 2582857 - RNA, 19 nt, Artificial Sequence
  Description of Artificial Sequence: Synthetic oligonucleotide
  Antisense strand to SEQ ID NO: 2582856
aucaucacuugccagcucc

SEQ ID NO: 2582858 - RNA, 19 nt, Artificial Sequence
  Description of Artificial Sequence: Synthetic oligonucleotide
  Sense strand starting at position 1290 of SEQ ID NO: 1889170
augcauuguaguggcuuaa

SEQ ID NO: 2582859 - RNA, 19 nt, Artificial Sequence
  Description of Artificial Sequence: Synthetic oligonucleotide
  Antisense strand to SEQ ID NO: 2582858
uuaagccacuacaaugcau

SEQ ID NO: 2582860 - RNA, 19 nt, Artificial Sequence
  Description of Artificial Sequence: Synthetic oligonucleotide
  Sense strand starting at position 1294 of SEQ ID NO: 1889170
auuguaguggcuuaagguu

SEQ ID NO: 2582861 - RNA, 19 nt, Artificial Sequence
  Description of Artificial Sequence: Synthetic oligonucleotide
  Antisense strand to SEQ ID NO: 2582860
aaccuuaagccacuacaau

SEQ ID NO: 2582862 - RNA, 19 nt, Artificial Sequence
  Description of Artificial Sequence: Synthetic oligonucleotide
  Sense strand starting at position 1321 of SEQ ID NO: 1889170
cugaaauguggguguugca

SEQ ID NO: 2582863 - RNA, 19 nt, Artificial Sequence
  Description of Artificial Sequence: Synthetic oligonucleotide
  Antisense strand to SEQ ID NO: 2582862
ugcaacacccacauuucag

SEQ ID NO: 2582864 - RNA, 19 nt, Artificial Sequence
  Description of Artificial Sequence: Synthetic oligonucleotide
  Sense strand starting at position 1380 of SEQ ID NO: 1889170
ugggauugcucauugcagu

SEQ ID NO: 2582865 - RNA, 19 nt, Artificial Sequence
  Description of Artificial Sequence: Synthetic oligonucleotide
  Antisense strand to SEQ ID NO: 2582864
acugcaaugagcaauccca

SEQ ID NO: 2582866 - RNA, 19 nt, Artificial Sequence
  Description of Artificial Sequence: Synthetic oligonucleotide
  Sense strand starting at position 1381 of SEQ ID NO: 1889170
gggauugcucauugcaguu

SEQ ID NO: 2582867 - RNA, 19 nt, Artificial Sequence
  Description of Artificial Sequence: Synthetic oligonucleotide
  Antisense strand to SEQ ID NO: 2582866
aacugcaaugagcaauccc

SEQ ID NO: 2582868 - RNA, 19 nt, Artificial Sequence
  Description of Artificial Sequence: Synthetic oligonucleotide
  Sense strand starting at position 1393 of SEQ ID NO: 1889170
ugcaguuuccugcaugauc

SEQ ID NO: 2582869 - RNA, 19 nt, Artificial Sequence
  Description of Artificial Sequence: Synthetic oligonucleotide
  Antisense strand to SEQ ID NO: 2582868
gaucaugcaggaaacugca

SEQ ID NO: 2582870 - RNA, 19 nt, Artificial Sequence
  Description of Artificial Sequence: Synthetic oligonucleotide
  Sense strand starting at position 1401 of SEQ ID NO: 1889170
ccugcaugauccuuggguu

SEQ ID NO: 2582871 - RNA, 19 nt, Artificial Sequence
  Description of Artificial Sequence: Synthetic oligonucleotide
  Antisense strand to SEQ ID NO: 2582870
aacccaaggaucaugcagg

SEQ ID NO: 2582872 - RNA, 19 nt, Artificial Sequence
  Description of Artificial Sequence: Synthetic oligonucleotide
  Sense strand starting at position 1484 of SEQ ID NO: 1889170
ggccucuguucccucuaaa

SEQ ID NO: 2582873 - RNA, 19 nt, Artificial Sequence
  Description of Artificial Sequence: Synthetic oligonucleotide
  Antisense strand to SEQ ID NO: 2582872
uuuagagggaacagaggcc

SEQ ID NO: 2582874 - RNA, 19 nt, Artificial Sequence
  Description of Artificial Sequence: Synthetic oligonucleotide
  Sense strand starting at position 1803 of SEQ ID NO: 1889170
acugcaguggaaugagaua

SEQ ID NO: 2582875 - RNA, 19 nt, Artificial Sequence
  Description of Artificial Sequence: Synthetic oligonucleotide
  Antisense strand to SEQ ID NO: 2582874
uaucucauuccacugcagu

SEQ ID NO: 2582876 - RNA, 19 nt, Artificial Sequence
  Description of Artificial Sequence: Synthetic oligonucleotide
  Sense strand starting at position 1917 of SEQ ID NO: 1889170
cgaggaugccaaugcagua

SEQ ID NO: 2582877 - RNA, 19 nt, Artificial Sequence
  Description of Artificial Sequence: Synthetic oligonucleotide
  Antisense strand to SEQ ID NO: 2582876
uacugcauuggcauccucg

SEQ ID NO: 2582878 - RNA, 19 nt, Artificial Sequence
  Description of Artificial Sequence: Synthetic oligonucleotide
  Sense strand starting at position 2105 of SEQ ID NO: 1889170
gcuggagugaagcaugaau

SEQ ID NO: 2582879 - RNA, 19 nt, Artificial Sequence
  Description of Artificial Sequence: Synthetic oligonucleotide
  Antisense strand to SEQ ID NO: 2582878
auucaugcuucacuccagc

SEQ ID NO: 2582880 - RNA, 19 nt, Artificial Sequence
  Description of Artificial Sequence: Synthetic oligonucleotide
  Sense strand starting at position 2268 of SEQ ID NO: 1889170
caacaucuggugugccaaa

SEQ ID NO: 2582881 - RNA, 19 nt, Artificial Sequence
  Description of Artificial Sequence: Synthetic oligonucleotide
  Antisense strand to SEQ ID NO: 2582880
uuuggcacaccagauguug

SEQ ID NO: 2582882 - RNA, 19 nt, Artificial Sequence
  Description of Artificial Sequence: Synthetic oligonucleotide
  Sense strand starting at position 2289 of SEQ ID NO: 1889170
aucuacaucuggucaagga

SEQ ID NO: 2582883 - RNA, 19 nt, Artificial Sequence
  Description of Artificial Sequence: Synthetic oligonucleotide
  Antisense strand to SEQ ID NO: 2582882
uccuugaccagauguagau

SEQ ID NO: 2582884 - RNA, 19 nt, Artificial Sequence
  Description of Artificial Sequence: Synthetic oligonucleotide
  Sense strand starting at position 2312 of SEQ ID NO: 1889170
ccagaugauucagugggca

SEQ ID NO: 2582885 - RNA, 19 nt, Artificial Sequence
  Description of Artificial Sequence: Synthetic oligonucleotide
  Antisense strand to SEQ ID NO: 2582884
ugcccacugaaucaucugg

SEQ ID NO: 2582886 - RNA, 19 nt, Artificial Sequence
  Description of Artificial Sequence: Synthetic oligonucleotide
  Sense strand starting at position 2346 of SEQ ID NO: 1889170
gcaauucugcaagagcaca

SEQ ID NO: 2582887 - RNA, 19 nt, Artificial Sequence
  Description of Artificial Sequence: Synthetic oligonucleotide
  Antisense strand to SEQ ID NO: 2582886
ugugcucuugcagaauugc

SEQ ID NO: 2582888 - RNA, 19 nt, Artificial Sequence
  Description of Artificial Sequence: Synthetic oligonucleotide
  Sense strand starting at position 2378 of SEQ ID NO: 1889170
agggauaucucccagacau

SEQ ID NO: 2582889 - RNA, 19 nt, Artificial Sequence
  Description of Artificial Sequence: Synthetic oligonucleotide
  Antisense strand to SEQ ID NO: 2582888
augucugggagauaucccu

SEQ ID NO: 2582890 - RNA, 19 nt, Artificial Sequence
  Description of Artificial Sequence: Synthetic oligonucleotide
  Sense strand starting at position 2413 of SEQ ID NO: 1889170
cgauguugauccucuguuu

SEQ ID NO: 2582891 - RNA, 19 nt, Artificial Sequence
  Description of Artificial Sequence: Synthetic oligonucleotide
  Antisense strand to SEQ ID NO: 2582890
aaacagaggaucaacaucg

SEQ ID NO: 2582892 - RNA, 19 nt, Artificial Sequence
  Description of Artificial Sequence: Synthetic oligonucleotide
  Sense strand starting at position 2424 of SEQ ID NO: 1889170
cucuguuucugucugguga

SEQ ID NO: 2582893 - RNA, 19 nt, Artificial Sequence
  Description of Artificial Sequence: Synthetic oligonucleotide
  Antisense strand to SEQ ID NO: 2582892
ucaccagacagaaacagag

SEQ ID NO: 2582894 - RNA, 19 nt, Artificial Sequence
  Description of Artificial Sequence: Synthetic oligonucleotide
  Sense strand starting at position 2661 of SEQ ID NO: 1889170
guguguggugucuucuuau

SEQ ID NO: 2582895 - RNA, 19 nt, Artificial Sequence
  Description of Artificial Sequence: Synthetic oligonucleotide
  Antisense strand to SEQ ID NO: 2582894
auaagaagacaccacacac

SEQ ID NO: 2582896 - RNA, 19 nt, Artificial Sequence
  Description of Artificial Sequence: Synthetic oligonucleotide
  Sense strand starting at position 2667 of SEQ ID NO: 1889170
ggugucuucuuauccuagu

SEQ ID NO: 2582897 - RNA, 19 nt, Artificial Sequence
  Description of Artificial Sequence: Synthetic oligonucleotide
  Antisense strand to SEQ ID NO: 2582896
acuaggauaagaagacacc

SEQ ID NO: 2582898 - RNA, 19 nt, Artificial Sequence
  Description of Artificial Sequence: Synthetic oligonucleotide
  Sense strand starting at position 2699 of SEQ ID NO: 1889170
ggaccugucugccugagga

SEQ ID NO: 2582899 - RNA, 19 nt, Artificial Sequence
  Description of Artificial Sequence: Synthetic oligonucleotide
  Antisense strand to SEQ ID NO: 2582898
uccucaggcagacaggucc

SEQ ID NO: 2582900 - RNA, 19 nt, Artificial Sequence
  Description of Artificial Sequence: Synthetic oligonucleotide
  Sense strand starting at position 2713 of SEQ ID NO: 1889170
gaggaagcccuguaguuag

SEQ ID NO: 2582901 - RNA, 19 nt, Artificial Sequence
  Description of Artificial Sequence: Synthetic oligonucleotide
  Antisense strand to SEQ ID NO: 2582900
cuaacuacagggcuuccuc

SEQ ID NO: 2582902 - RNA, 19 nt, Artificial Sequence
  Description of Artificial Sequence: Synthetic oligonucleotide
  Sense strand starting at position 3010 of SEQ ID NO: 1889170
ccaggacauucccagggaa

SEQ ID NO: 2582903 - RNA, 19 nt, Artificial Sequence
  Description of Artificial Sequence: Synthetic oligonucleotide
  Antisense strand to SEQ ID NO: 2582902
uucccugggaauguccugg

SEQ ID NO: 2582904 - RNA, 19 nt, Artificial Sequence
  Description of Artificial Sequence: Synthetic oligonucleotide
  Sense strand starting at position 3371 of SEQ ID NO: 1889170
ggagucuaccuccaaguga

SEQ ID NO: 2582905 - RNA, 19 nt, Artificial Sequence
  Description of Artificial Sequence: Synthetic oligonucleotide
  Antisense strand to SEQ ID NO: 2582904
ucacuuggagguagacucc

SEQ ID NO: 2582906 - RNA, 19 nt, Artificial Sequence
  Description of Artificial Sequence: Synthetic oligonucleotide
  Sense strand starting at position 3474 of SEQ ID NO: 1889170
acgucagucuccuccucaa

SEQ ID NO: 2582907 - RNA, 19 nt, Artificial Sequence
  Description of Artificial Sequence: Synthetic oligonucleotide
  Antisense strand to SEQ ID NO: 2582906
uugaggaggagacugacgu

SEQ ID NO: 2582908 - RNA, 19 nt, Artificial Sequence
  Description of Artificial Sequence: Synthetic oligonucleotide
  Sense strand starting at position 3510 of SEQ ID NO: 1889170
gccauuaugucuuccaccu

SEQ ID NO: 2582909 - RNA, 19 nt, Artificial Sequence
  Description of Artificial Sequence: Synthetic oligonucleotide
  Antisense strand to SEQ ID NO: 2582908
agguggaagacauaauggc

SEQ ID NO: 2582910 - RNA, 19 nt, Artificial Sequence
  Description of Artificial Sequence: Synthetic oligonucleotide
  Sense strand starting at position 61 of SEQ ID NO: 1889171
augagaccagucuggcaaa

SEQ ID NO: 2582911 - RNA, 19 nt, Artificial Sequence
  Description of Artificial Sequence: Synthetic oligonucleotide
  Antisense strand to SEQ ID NO: 2582910
uuugccagacuggucucau

SEQ ID NO: 2582912 - RNA, 19 nt, Artificial Sequence
  Description of Artificial Sequence: Synthetic oligonucleotide
  Sense strand starting at position 119 of SEQ ID NO: 1889171
caggacaugugccuguaau

SEQ ID NO: 2582913 - RNA, 19 nt, Artificial Sequence
  Description of Artificial Sequence: Synthetic oligonucleotide
  Antisense strand to SEQ ID NO: 2582912
auuacaggcacauguccug

SEQ ID NO: 2582914 - RNA, 19 nt, Artificial Sequence
  Description of Artificial Sequence: Synthetic oligonucleotide
  Sense strand starting at position 120 of SEQ ID NO: 1889171
aggacaugugccuguaauc

SEQ ID NO: 2582915 - RNA, 19 nt, Artificial Sequence
  Description of Artificial Sequence: Synthetic oligonucleotide
  Antisense strand to SEQ ID NO: 2582914
gauuacaggcacauguccu

SEQ ID NO: 2582916 - RNA, 19 nt, Artificial Sequence
  Description of Artificial Sequence: Synthetic oligonucleotide
  Sense strand starting at position 527 of SEQ ID NO: 1889171
gaguccaugucccuguauu

SEQ ID NO: 2582917 - RNA, 19 nt, Artificial Sequence
  Description of Artificial Sequence: Synthetic oligonucleotide
  Antisense strand to SEQ ID NO: 2582916
aauacagggacauggacuc

SEQ ID NO: 2582918 - RNA, 19 nt, Artificial Sequence
  Description of Artificial Sequence: Synthetic oligonucleotide
  Sense strand starting at position 559 of SEQ ID NO: 1889171
uaacaauugccaggaguag

SEQ ID NO: 2582919 - RNA, 19 nt, Artificial Sequence
  Description of Artificial Sequence: Synthetic oligonucleotide
  Antisense strand to SEQ ID NO: 2582918
cuacuccuggcaauuguua

SEQ ID NO: 2582920 - RNA, 19 nt, Artificial Sequence
  Description of Artificial Sequence: Synthetic oligonucleotide
  Sense strand starting at position 643 of SEQ ID NO: 1889171
aauggauccuucugcaguu

SEQ ID NO: 2582921 - RNA, 19 nt, Artificial Sequence
  Description of Artificial Sequence: Synthetic oligonucleotide
  Antisense strand to SEQ ID NO: 2582920
aacugcagaaggauccauu

SEQ ID NO: 2582922 - RNA, 19 nt, Artificial Sequence
  Description of Artificial Sequence: Synthetic oligonucleotide
  Sense strand starting at position 1134 of SEQ ID NO: 1889171
ucagguggauaucugugua

SEQ ID NO: 2582923 - RNA, 19 nt, Artificial Sequence
  Description of Artificial Sequence: Synthetic oligonucleotide
  Antisense strand to SEQ ID NO: 2582922
uacacagauauccaccuga

SEQ ID NO: 2582924 - RNA, 19 nt, Artificial Sequence
  Description of Artificial Sequence: Synthetic oligonucleotide
  Sense strand starting at position 1137 of SEQ ID NO: 1889171
gguggauaucuguguagag

SEQ ID NO: 2582925 - RNA, 19 nt, Artificial Sequence
  Description of Artificial Sequence: Synthetic oligonucleotide
  Antisense strand to SEQ ID NO: 2582924
cucuacacagauauccacc

SEQ ID NO: 2582926 - RNA, 19 nt, Artificial Sequence
  Description of Artificial Sequence: Synthetic oligonucleotide
  Sense strand starting at position 1138 of SEQ ID NO: 1889171
guggauaucuguguagaga

SEQ ID NO: 2582927 - RNA, 19 nt, Artificial Sequence
  Description of Artificial Sequence: Synthetic oligonucleotide
  Antisense strand to SEQ ID NO: 2582926
ucucuacacagauauccac

SEQ ID NO: 2582928 - RNA, 19 nt, Artificial Sequence
  Description of Artificial Sequence: Synthetic oligonucleotide
  Sense strand starting at position 1157 of SEQ ID NO: 1889171
gggagaggguccuggauga

SEQ ID NO: 2582929 - RNA, 19 nt, Artificial Sequence
  Description of Artificial Sequence: Synthetic oligonucleotide
  Antisense strand to SEQ ID NO: 2582928
ucauccaggacccucuccc

SEQ ID NO: 2582930 - RNA, 19 nt, Artificial Sequence
  Description of Artificial Sequence: Synthetic oligonucleotide
  Sense strand starting at position 1181 of SEQ ID NO: 1889171
aacugagucucagguggua

SEQ ID NO: 2582931 - RNA, 19 nt, Artificial Sequence
  Description of Artificial Sequence: Synthetic oligonucleotide
  Antisense strand to SEQ ID NO: 2582930
uaccaccugagacucaguu

SEQ ID NO: 2582932 - RNA, 19 nt, Artificial Sequence
  Description of Artificial Sequence: Synthetic oligonucleotide
  Sense strand starting at position 1291 of SEQ ID NO: 1889171
augcauuguaguggcuuaa

SEQ ID NO: 2582933 - RNA, 19 nt, Artificial Sequence
  Description of Artificial Sequence: Synthetic oligonucleotide
  Antisense strand to SEQ ID NO: 2582932
uuaagccacuacaaugcau

SEQ ID NO: 2582934 - RNA, 19 nt, Artificial Sequence
  Description of Artificial Sequence: Synthetic oligonucleotide
  Sense strand starting at position 1295 of SEQ ID NO: 1889171
auuguaguggcuuaagguu

SEQ ID NO: 2582935 - RNA, 19 nt, Artificial Sequence
  Description of Artificial Sequence: Synthetic oligonucleotide
  Antisense strand to SEQ ID NO: 2582934
aaccuuaagccacuacaau

SEQ ID NO: 2582936 - RNA, 19 nt, Artificial Sequence
  Description of Artificial Sequence: Synthetic oligonucleotide
  Sense strand starting at position 1381 of SEQ ID NO: 1889171
ugggauugcucauugcagu

SEQ ID NO: 2582937 - RNA, 19 nt, Artificial Sequence
  Description of Artificial Sequence: Synthetic oligonucleotide
  Antisense strand to SEQ ID NO: 2582936
acugcaaugagcaauccca

SEQ ID NO: 2582938 - RNA, 19 nt, Artificial Sequence
  Description of Artificial Sequence: Synthetic oligonucleotide
  Sense strand starting at position 1382 of SEQ ID NO: 1889171
gggauugcucauugcaguu

SEQ ID NO: 2582939 - RNA, 19 nt, Artificial Sequence
  Description of Artificial Sequence: Synthetic oligonucleotide
  Antisense strand to SEQ ID NO: 2582938
aacugcaaugagcaauccc

SEQ ID NO: 2582940 - RNA, 19 nt, Artificial Sequence
  Description of Artificial Sequence: Synthetic oligonucleotide
  Sense strand starting at position 1394 of SEQ ID NO: 1889171
ugcaguuuccugcaugauc

SEQ ID NO: 2582941 - RNA, 19 nt, Artificial Sequence
  Description of Artificial Sequence: Synthetic oligonucleotide
  Antisense strand to SEQ ID NO: 2582940
gaucaugcaggaaacugca

SEQ ID NO: 2582942 - RNA, 19 nt, Artificial Sequence
  Description of Artificial Sequence: Synthetic oligonucleotide
  Sense strand starting at position 1402 of SEQ ID NO: 1889171
ccugcaugauccuuggguu

SEQ ID NO: 2582943 - RNA, 19 nt, Artificial Sequence
  Description of Artificial Sequence: Synthetic oligonucleotide
  Antisense strand to SEQ ID NO: 2582942
aacccaaggaucaugcagg

SEQ ID NO: 2582944 - RNA, 19 nt, Artificial Sequence
  Description of Artificial Sequence: Synthetic oligonucleotide
  Sense strand starting at position 1604 of SEQ ID NO: 1889171
gucacaguuuaaugccaau

SEQ ID NO: 2582945 - RNA, 19 nt, Artificial Sequence
  Description of Artificial Sequence: Synthetic oligonucleotide
  Antisense strand to SEQ ID NO: 2582944
auuggcauuaaacugugac

SEQ ID NO: 2582946 - RNA, 19 nt, Artificial Sequence
  Description of Artificial Sequence: Synthetic oligonucleotide
  Sense strand starting at position 1648 of SEQ ID NO: 1889171
cgagguccuuucccaugau

SEQ ID NO: 2582947 - RNA, 19 nt, Artificial Sequence
  Description of Artificial Sequence: Synthetic oligonucleotide
  Antisense strand to SEQ ID NO: 2582946
aucaugggaaaggaccucg

SEQ ID NO: 2582948 - RNA, 19 nt, Artificial Sequence
  Description of Artificial Sequence: Synthetic oligonucleotide
  Sense strand starting at position 1918 of SEQ ID NO: 1889171
cgaggaugccaaugcagua

SEQ ID NO: 2582949 - RNA, 19 nt, Artificial Sequence
  Description of Artificial Sequence: Synthetic oligonucleotide
  Antisense strand to SEQ ID NO: 2582948
uacugcauuggcauccucg

SEQ ID NO: 2582950 - RNA, 19 nt, Artificial Sequence
  Description of Artificial Sequence: Synthetic oligonucleotide
  Sense strand starting at position 2269 of SEQ ID NO: 1889171
caacaucuggugugccaaa

SEQ ID NO: 2582951 - RNA, 19 nt, Artificial Sequence
  Description of Artificial Sequence: Synthetic oligonucleotide
  Antisense strand to SEQ ID NO: 2582950
uuuggcacaccagauguug

SEQ ID NO: 2582952 - RNA, 19 nt, Artificial Sequence
  Description of Artificial Sequence: Synthetic oligonucleotide
  Sense strand starting at position 2290 of SEQ ID NO: 1889171
aucuacaucuggucaagga

SEQ ID NO: 2582953 - RNA, 19 nt, Artificial Sequence
  Description of Artificial Sequence: Synthetic oligonucleotide
  Antisense strand to SEQ ID NO: 2582952
uccuugaccagauguagau

SEQ ID NO: 2582954 - RNA, 19 nt, Artificial Sequence
  Description of Artificial Sequence: Synthetic oligonucleotide
  Sense strand starting at position 2313 of SEQ ID NO: 1889171
ccagaugauucagugggca

SEQ ID NO: 2582955 - RNA, 19 nt, Artificial Sequence
  Description of Artificial Sequence: Synthetic oligonucleotide
  Antisense strand to SEQ ID NO: 2582954
ugcccacugaaucaucugg

SEQ ID NO: 2582956 - RNA, 19 nt, Artificial Sequence
  Description of Artificial Sequence: Synthetic oligonucleotide
  Sense strand starting at position 2347 of SEQ ID NO: 1889171
gcaauucugcaagagcaca

SEQ ID NO: 2582957 - RNA, 19 nt, Artificial Sequence
  Description of Artificial Sequence: Synthetic oligonucleotide
  Antisense strand to SEQ ID NO: 2582956
ugugcucuugcagaauugc

SEQ ID NO: 2582958 - RNA, 19 nt, Artificial Sequence
  Description of Artificial Sequence: Synthetic oligonucleotide
  Sense strand starting at position 2379 of SEQ ID NO: 1889171
agggauaucucccagacau

SEQ ID NO: 2582959 - RNA, 19 nt, Artificial Sequence
  Description of Artificial Sequence: Synthetic oligonucleotide
  Antisense strand to SEQ ID NO: 2582958
augucugggagauaucccu

SEQ ID NO: 2582960 - RNA, 19 nt, Artificial Sequence
  Description of Artificial Sequence: Synthetic oligonucleotide
  Sense strand starting at position 2414 of SEQ ID NO: 1889171
cgauguugauccucuguuu

SEQ ID NO: 2582961 - RNA, 19 nt, Artificial Sequence
  Description of Artificial Sequence: Synthetic oligonucleotide
  Antisense strand to SEQ ID NO: 2582960
aaacagaggaucaacaucg

SEQ ID NO: 2582962 - RNA, 19 nt, Artificial Sequence
  Description of Artificial Sequence: Synthetic oligonucleotide
  Sense strand starting at position 2425 of SEQ ID NO: 1889171
cucuguuucugucugguga

SEQ ID NO: 2582963 - RNA, 19 nt, Artificial Sequence
  Description of Artificial Sequence: Synthetic oligonucleotide
  Antisense strand to SEQ ID NO: 2582962
ucaccagacagaaacagag

SEQ ID NO: 2582964 - RNA, 19 nt, Artificial Sequence
  Description of Artificial Sequence: Synthetic oligonucleotide
  Sense strand starting at position 2429 of SEQ ID NO: 1889171
guuucugucuggugaggag

SEQ ID NO: 2582965 - RNA, 19 nt, Artificial Sequence
  Description of Artificial Sequence: Synthetic oligonucleotide
  Antisense strand to SEQ ID NO: 2582964
cuccucaccagacagaaac

SEQ ID NO: 2582966 - RNA, 19 nt, Artificial Sequence
  Description of Artificial Sequence: Synthetic oligonucleotide
  Sense strand starting at position 2660 of SEQ ID NO: 1889171
ggguguguggugucuucuu

SEQ ID NO: 2582967 - RNA, 19 nt, Artificial Sequence
  Description of Artificial Sequence: Synthetic oligonucleotide
  Antisense strand to SEQ ID NO: 2582966
aagaagacaccacacaccc

SEQ ID NO: 2582968 - RNA, 19 nt, Artificial Sequence
  Description of Artificial Sequence: Synthetic oligonucleotide
  Sense strand starting at position 2662 of SEQ ID NO: 1889171
guguguggugucuucuuau

SEQ ID NO: 2582969 - RNA, 19 nt, Artificial Sequence
  Description of Artificial Sequence: Synthetic oligonucleotide
  Antisense strand to SEQ ID NO: 2582968
auaagaagacaccacacac

SEQ ID NO: 2582970 - RNA, 19 nt, Artificial Sequence
  Description of Artificial Sequence: Synthetic oligonucleotide
  Sense strand starting at position 2668 of SEQ ID NO: 1889171
ggugucuucuuauccuagu

SEQ ID NO: 2582971 - RNA, 19 nt, Artificial Sequence
  Description of Artificial Sequence: Synthetic oligonucleotide
  Antisense strand to SEQ ID NO: 2582970
acuaggauaagaagacacc

SEQ ID NO: 2582972 - RNA, 19 nt, Artificial Sequence
  Description of Artificial Sequence: Synthetic oligonucleotide
  Sense strand starting at position 2700 of SEQ ID NO: 1889171
ggaccugucugccugagga

SEQ ID NO: 2582973 - RNA, 19 nt, Artificial Sequence
  Description of Artificial Sequence: Synthetic oligonucleotide
  Antisense strand to SEQ ID NO: 2582972
uccucaggcagacaggucc

SEQ ID NO: 2582974 - RNA, 19 nt, Artificial Sequence
  Description of Artificial Sequence: Synthetic oligonucleotide
  Sense strand starting at position 2714 of SEQ ID NO: 1889171
gaggaagcccuguaguuag

SEQ ID NO: 2582975 - RNA, 19 nt, Artificial Sequence
  Description of Artificial Sequence: Synthetic oligonucleotide
  Antisense strand to SEQ ID NO: 2582974
cuaacuacagggcuuccuc

SEQ ID NO: 2582976 - RNA, 19 nt, Artificial Sequence
  Description of Artificial Sequence: Synthetic oligonucleotide
  Sense strand starting at position 3011 of SEQ ID NO: 1889171
ccaggacauucccagggaa

SEQ ID NO: 2582977 - RNA, 19 nt, Artificial Sequence
  Description of Artificial Sequence: Synthetic oligonucleotide
  Antisense strand to SEQ ID NO: 2582976
uucccugggaauguccugg

SEQ ID NO: 2582978 - RNA, 19 nt, Artificial Sequence
  Description of Artificial Sequence: Synthetic oligonucleotide
  Sense strand starting at position 3041 of SEQ ID NO: 1889171
gacauugugcugugcguga

SEQ ID NO: 2582979 - RNA, 19 nt, Artificial Sequence
  Description of Artificial Sequence: Synthetic oligonucleotide
  Antisense strand to SEQ ID NO: 2582978
ucacgcacagcacaauguc

SEQ ID NO: 2582980 - RNA, 19 nt, Artificial Sequence
  Description of Artificial Sequence: Synthetic oligonucleotide
  Sense strand starting at position 3073 of SEQ ID NO: 1889171
ccgcgauucucccuuguga

SEQ ID NO: 2582981 - RNA, 19 nt, Artificial Sequence
  Description of Artificial Sequence: Synthetic oligonucleotide
  Antisense strand to SEQ ID NO: 2582980
ucacaagggagaaucgcgg

SEQ ID NO: 2582982 - RNA, 19 nt, Artificial Sequence
  Description of Artificial Sequence: Synthetic oligonucleotide
  Sense strand starting at position 3075 of SEQ ID NO: 1889171
gcgauucucccuugugagu

SEQ ID NO: 2582983 - RNA, 19 nt, Artificial Sequence
  Description of Artificial Sequence: Synthetic oligonucleotide
  Antisense strand to SEQ ID NO: 2582982
acucacaagggagaaucgc

SEQ ID NO: 2582984 - RNA, 19 nt, Artificial Sequence
  Description of Artificial Sequence: Synthetic oligonucleotide
  Sense strand starting at position 3372 of SEQ ID NO: 1889171
ggagucuaccuccaaguga

SEQ ID NO: 2582985 - RNA, 19 nt, Artificial Sequence
  Description of Artificial Sequence: Synthetic oligonucleotide
  Antisense strand to SEQ ID NO: 2582984
ucacuuggagguagacucc

SEQ ID NO: 2582986 - RNA, 19 nt, Artificial Sequence
  Description of Artificial Sequence: Synthetic oligonucleotide
  Sense strand starting at position 3475 of SEQ ID NO: 1889171
acgucagucuccuccucaa

SEQ ID NO: 2582987 - RNA, 19 nt, Artificial Sequence
  Description of Artificial Sequence: Synthetic oligonucleotide
  Antisense strand to SEQ ID NO: 2582986
uugaggaggagacugacgu

SEQ ID NO: 2582988 - RNA, 19 nt, Artificial Sequence
  Description of Artificial Sequence: Synthetic oligonucleotide
  Sense strand starting at position 3511 of SEQ ID NO: 1889171
gccauuaugucuuccaccu

SEQ ID NO: 2582989 - RNA, 19 nt, Artificial Sequence
  Description of Artificial Sequence: Synthetic oligonucleotide
  Antisense strand to SEQ ID NO: 2582988
agguggaagacauaauggc

SEQ ID NO: 2582990 - RNA, 19 nt, Artificial Sequence
  Description of Artificial Sequence: Synthetic oligonucleotide
  Sense strand starting at position 244 of SEQ ID NO: 1889172
guugaaucccagugaaagc

SEQ ID NO: 2582991 - RNA, 19 nt, Artificial Sequence
  Description of Artificial Sequence: Synthetic oligonucleotide
  Antisense strand to SEQ ID NO: 2582990
gcuuucacugggauucaac

SEQ ID NO: 2582992 - RNA, 19 nt, Artificial Sequence
  Description of Artificial Sequence: Synthetic oligonucleotide
  Sense strand starting at position 286 of SEQ ID NO: 1889172
uaugaaggcuugccugaga

SEQ ID NO: 2582993 - RNA, 19 nt, Artificial Sequence
  Description of Artificial Sequence: Synthetic oligonucleotide
  Antisense strand to SEQ ID NO: 2582992
ucucaggcaagccuucaua

SEQ ID NO: 2582994 - RNA, 19 nt, Artificial Sequence
  Description of Artificial Sequence: Synthetic oligonucleotide
  Sense strand starting at position 289 of SEQ ID NO: 1889172
gaaggcuugccugagagaa

SEQ ID NO: 2582995 - RNA, 19 nt, Artificial Sequence
  Description of Artificial Sequence: Synthetic oligonucleotide
  Antisense strand to SEQ ID NO: 2582994
uucucucaggcaagccuuc

SEQ ID NO: 2582996 - RNA, 19 nt, Artificial Sequence
  Description of Artificial Sequence: Synthetic oligonucleotide
  Sense strand starting at position 329 of SEQ ID NO: 1889172
ucaagcuuuguugaauaau

SEQ ID NO: 2582997 - RNA, 19 nt, Artificial Sequence
  Description of Artificial Sequence: Synthetic oligonucleotide
  Antisense strand to SEQ ID NO: 2582996
auuauucaacaaagcuuga

SEQ ID NO: 2582998 - RNA, 19 nt, Artificial Sequence
  Description of Artificial Sequence: Synthetic oligonucleotide
  Sense strand starting at position 338 of SEQ ID NO: 1889172
guugaauaauuccugucag

SEQ ID NO: 2582999 - RNA, 19 nt, Artificial Sequence
  Description of Artificial Sequence: Synthetic oligonucleotide
  Antisense strand to SEQ ID NO: 2582998
cugacaggaauuauucaac

SEQ ID NO: 2583000 - RNA, 19 nt, Artificial Sequence
  Description of Artificial Sequence: Synthetic oligonucleotide
  Sense strand starting at position 391 of SEQ ID NO: 1889172
cucagcucccacuaugaga

SEQ ID NO: 2583001 - RNA, 19 nt, Artificial Sequence
  Description of Artificial Sequence: Synthetic oligonucleotide
  Antisense strand to SEQ ID NO: 2583000
ucucauagugggagcugag

SEQ ID NO: 2583002 - RNA, 19 nt, Artificial Sequence
  Description of Artificial Sequence: Synthetic oligonucleotide
  Sense strand starting at position 553 of SEQ ID NO: 1889172
ucugauaguagugggugaa

SEQ ID NO: 2583003 - RNA, 19 nt, Artificial Sequence
  Description of Artificial Sequence: Synthetic oligonucleotide
  Antisense strand to SEQ ID NO: 2583002
uucacccacuacuaucaga

SEQ ID NO: 2583004 - RNA, 19 nt, Artificial Sequence
  Description of Artificial Sequence: Synthetic oligonucleotide
  Sense strand starting at position 708 of SEQ ID NO: 1889172
uucugaaauguuuaaugug

SEQ ID NO: 2583005 - RNA, 19 nt, Artificial Sequence
  Description of Artificial Sequence: Synthetic oligonucleotide
  Antisense strand to SEQ ID NO: 2583004
cacauuaaacauuucagaa

SEQ ID NO: 2583006 - RNA, 19 nt, Artificial Sequence
  Description of Artificial Sequence: Synthetic oligonucleotide
  Sense strand starting at position 787 of SEQ ID NO: 1889172
agaagaggccauuguggaa

SEQ ID NO: 2583007 - RNA, 19 nt, Artificial Sequence
  Description of Artificial Sequence: Synthetic oligonucleotide
  Antisense strand to SEQ ID NO: 2583006
uuccacaauggccucuucu

SEQ ID NO: 2583008 - RNA, 19 nt, Artificial Sequence
  Description of Artificial Sequence: Synthetic oligonucleotide
  Sense strand starting at position 863 of SEQ ID NO: 1889172
gccucaaauccagaguuug

SEQ ID NO: 2583009 - RNA, 19 nt, Artificial Sequence
  Description of Artificial Sequence: Synthetic oligonucleotide
  Antisense strand to SEQ ID NO: 2583008
caaacucuggauuugaggc

SEQ ID NO: 2583010 - RNA, 19 nt, Artificial Sequence
  Description of Artificial Sequence: Synthetic oligonucleotide
  Sense strand starting at position 958 of SEQ ID NO: 1889172
cagacagauugugcaauua

SEQ ID NO: 2583011 - RNA, 19 nt, Artificial Sequence
  Description of Artificial Sequence: Synthetic oligonucleotide
  Antisense strand to SEQ ID NO: 2583010
uaauugcacaaucugucug

SEQ ID NO: 2583012 - RNA, 19 nt, Artificial Sequence
  Description of Artificial Sequence: Synthetic oligonucleotide
  Sense strand starting at position 1547 of SEQ ID NO: 1889172
gccacauuccuuuaaguag

SEQ ID NO: 2583013 - RNA, 19 nt, Artificial Sequence
  Description of Artificial Sequence: Synthetic oligonucleotide
  Antisense strand to SEQ ID NO: 2583012
cuacuuaaaggaauguggc

SEQ ID NO: 2583014 - RNA, 19 nt, Artificial Sequence
  Description of Artificial Sequence: Synthetic oligonucleotide
  Sense strand starting at position 1739 of SEQ ID NO: 1889172
gggaacaugugggcuguaa

SEQ ID NO: 2583015 - RNA, 19 nt, Artificial Sequence
  Description of Artificial Sequence: Synthetic oligonucleotide
  Antisense strand to SEQ ID NO: 2583014
uuacagcccacauguuccc

SEQ ID NO: 2583016 - RNA, 19 nt, Artificial Sequence
  Description of Artificial Sequence: Synthetic oligonucleotide
  Sense strand starting at position 1741 of SEQ ID NO: 1889172
gaacaugugggcuguaacu

SEQ ID NO: 2583017 - RNA, 19 nt, Artificial Sequence
  Description of Artificial Sequence: Synthetic oligonucleotide
  Antisense strand to SEQ ID NO: 2583016
aguuacagcccacauguuc

SEQ ID NO: 2583018 - RNA, 19 nt, Artificial Sequence
  Description of Artificial Sequence: Synthetic oligonucleotide
  Sense strand starting at position 1747 of SEQ ID NO: 1889172
gugggcuguaacuagaaau

SEQ ID NO: 2583019 - RNA, 19 nt, Artificial Sequence
  Description of Artificial Sequence: Synthetic oligonucleotide
  Antisense strand to SEQ ID NO: 2583018
auuucuaguuacagcccac

SEQ ID NO: 2583020 - RNA, 19 nt, Artificial Sequence
  Description of Artificial Sequence: Synthetic oligonucleotide
  Sense strand starting at position 1919 of SEQ ID NO: 1889172
ggaucaugagacuguccca

SEQ ID NO: 2583021 - RNA, 19 nt, Artificial Sequence
  Description of Artificial Sequence: Synthetic oligonucleotide
  Antisense strand to SEQ ID NO: 2583020
ugggacagucucaugaucc

SEQ ID NO: 2583022 - RNA, 19 nt, Artificial Sequence
  Description of Artificial Sequence: Synthetic oligonucleotide
  Sense strand starting at position 1922 of SEQ ID NO: 1889172
ucaugagacugucccaagu

SEQ ID NO: 2583023 - RNA, 19 nt, Artificial Sequence
  Description of Artificial Sequence: Synthetic oligonucleotide
  Antisense strand to SEQ ID NO: 2583022
acuugggacagucucauga

SEQ ID NO: 2583024 - RNA, 19 nt, Artificial Sequence
  Description of Artificial Sequence: Synthetic oligonucleotide
  Sense strand starting at position 2210 of SEQ ID NO: 1889172
gcuagaagccauggucaga

SEQ ID NO: 2583025 - RNA, 19 nt, Artificial Sequence
  Description of Artificial Sequence: Synthetic oligonucleotide
  Antisense strand to SEQ ID NO: 2583024
ucugaccauggcuucuagc

SEQ ID NO: 2583026 - RNA, 19 nt, Artificial Sequence
  Description of Artificial Sequence: Synthetic oligonucleotide
  Sense strand starting at position 2370 of SEQ ID NO: 1889172
ucgggucucaugggaauug

SEQ ID NO: 2583027 - RNA, 19 nt, Artificial Sequence
  Description of Artificial Sequence: Synthetic oligonucleotide
  Antisense strand to SEQ ID NO: 2583026
caauucccaugagacccga

SEQ ID NO: 2583028 - RNA, 19 nt, Artificial Sequence
  Description of Artificial Sequence: Synthetic oligonucleotide
  Sense strand starting at position 2413 of SEQ ID NO: 1889172
ggguucuuugggugagaga

SEQ ID NO: 2583029 - RNA, 19 nt, Artificial Sequence
  Description of Artificial Sequence: Synthetic oligonucleotide
  Antisense strand to SEQ ID NO: 2583028
ucucucacccaaagaaccc

SEQ ID NO: 2583030 - RNA, 19 nt, Artificial Sequence
  Description of Artificial Sequence: Synthetic oligonucleotide
  Sense strand starting at position 2422 of SEQ ID NO: 1889172
gggugagagaauuauacgu

SEQ ID NO: 2583031 - RNA, 19 nt, Artificial Sequence
  Description of Artificial Sequence: Synthetic oligonucleotide
  Antisense strand to SEQ ID NO: 2583030
acguauaauucucucaccc

SEQ ID NO: 2583032 - RNA, 19 nt, Artificial Sequence
  Description of Artificial Sequence: Synthetic oligonucleotide
  Sense strand starting at position 2427 of SEQ ID NO: 1889172
agagaauuauacgugagac

SEQ ID NO: 2583033 - RNA, 19 nt, Artificial Sequence
  Description of Artificial Sequence: Synthetic oligonucleotide
  Antisense strand to SEQ ID NO: 2583032
gucucacguauaauucucu

SEQ ID NO: 2583034 - RNA, 19 nt, Artificial Sequence
  Description of Artificial Sequence: Synthetic oligonucleotide
  Sense strand starting at position 2446 of SEQ ID NO: 1889172
cccagagaugggugccaau

SEQ ID NO: 2583035 - RNA, 19 nt, Artificial Sequence
  Description of Artificial Sequence: Synthetic oligonucleotide
  Antisense strand to SEQ ID NO: 2583034
auuggcacccaucucuggg

SEQ ID NO: 2583036 - RNA, 19 nt, Artificial Sequence
  Description of Artificial Sequence: Synthetic oligonucleotide
  Sense strand starting at position 2463 of SEQ ID NO: 1889172
augaaagauggcugggcua

SEQ ID NO: 2583037 - RNA, 19 nt, Artificial Sequence
  Description of Artificial Sequence: Synthetic oligonucleotide
  Antisense strand to SEQ ID NO: 2583036
uagcccagccaucuuucau

SEQ ID NO: 2583038 - RNA, 19 nt, Artificial Sequence
  Description of Artificial Sequence: Synthetic oligonucleotide
  Sense strand starting at position 2465 of SEQ ID NO: 1889172
gaaagauggcugggcuauu

SEQ ID NO: 2583039 - RNA, 19 nt, Artificial Sequence
  Description of Artificial Sequence: Synthetic oligonucleotide
  Antisense strand to SEQ ID NO: 2583038
aauagcccagccaucuuuc

SEQ ID NO: 2583040 - RNA, 19 nt, Artificial Sequence
  Description of Artificial Sequence: Synthetic oligonucleotide
  Sense strand starting at position 2685 of SEQ ID NO: 1889172
uacuguggauucucuauga

SEQ ID NO: 2583041 - RNA, 19 nt, Artificial Sequence
  Description of Artificial Sequence: Synthetic oligonucleotide
  Antisense strand to SEQ ID NO: 2583040
ucauagagaauccacagua

SEQ ID NO: 2583042 - RNA, 19 nt, Artificial Sequence
  Description of Artificial Sequence: Synthetic oligonucleotide
  Sense strand starting at position 2689 of SEQ ID NO: 1889172
guggauucucuaugaaaga

SEQ ID NO: 2583043 - RNA, 19 nt, Artificial Sequence
  Description of Artificial Sequence: Synthetic oligonucleotide
  Antisense strand to SEQ ID NO: 2583042
ucuuucauagagaauccac

SEQ ID NO: 2583044 - RNA, 19 nt, Artificial Sequence
  Description of Artificial Sequence: Synthetic oligonucleotide
  Sense strand starting at position 2728 of SEQ ID NO: 1889172
cucagagaaugaccuguuu

SEQ ID NO: 2583045 - RNA, 19 nt, Artificial Sequence
  Description of Artificial Sequence: Synthetic oligonucleotide
  Antisense strand to SEQ ID NO: 2583044
aaacaggucauucucugag

SEQ ID NO: 2583046 - RNA, 19 nt, Artificial Sequence
  Description of Artificial Sequence: Synthetic oligonucleotide
  Sense strand starting at position 2905 of SEQ ID NO: 1889172
gccaauagaucugugguga

SEQ ID NO: 2583047 - RNA, 19 nt, Artificial Sequence
  Description of Artificial Sequence: Synthetic oligonucleotide
  Antisense strand to SEQ ID NO: 2583046
ucaccacagaucuauuggc

SEQ ID NO: 2583048 - RNA, 19 nt, Artificial Sequence
  Description of Artificial Sequence: Synthetic oligonucleotide
  Sense strand starting at position 2906 of SEQ ID NO: 1889172
ccaauagaucuguggugag

SEQ ID NO: 2583049 - RNA, 19 nt, Artificial Sequence
  Description of Artificial Sequence: Synthetic oligonucleotide
  Antisense strand to SEQ ID NO: 2583048
cucaccacagaucuauugg

SEQ ID NO: 2583050 - RNA, 19 nt, Artificial Sequence
  Description of Artificial Sequence: Synthetic oligonucleotide
  Sense strand starting at position 2950 of SEQ ID NO: 1889172
agugaaagaccuuguauac

SEQ ID NO: 2583051 - RNA, 19 nt, Artificial Sequence
  Description of Artificial Sequence: Synthetic oligonucleotide
  Antisense strand to SEQ ID NO: 2583050
guauacaaggucuuucacu

SEQ ID NO: 2583052 - RNA, 19 nt, Artificial Sequence
  Description of Artificial Sequence: Synthetic oligonucleotide
  Sense strand starting at position 2982 of SEQ ID NO: 1889172
uugcauaugcaaugaaaca

SEQ ID NO: 2583053 - RNA, 19 nt, Artificial Sequence
  Description of Artificial Sequence: Synthetic oligonucleotide
  Antisense strand to SEQ ID NO: 2583052
uguuucauugcauaugcaa

SEQ ID NO: 2583054 - RNA, 19 nt, Artificial Sequence
  Description of Artificial Sequence: Synthetic oligonucleotide
  Sense strand starting at position 3217 of SEQ ID NO: 1889172
cuccaugaacugugaauug

SEQ ID NO: 2583055 - RNA, 19 nt, Artificial Sequence
  Description of Artificial Sequence: Synthetic oligonucleotide
  Antisense strand to SEQ ID NO: 2583054
caauucacaguucauggag

SEQ ID NO: 2583056 - RNA, 19 nt, Artificial Sequence
  Description of Artificial Sequence: Synthetic oligonucleotide
  Sense strand starting at position 3265 of SEQ ID NO: 1889172
aggaaauccuaggccauga

SEQ ID NO: 2583057 - RNA, 19 nt, Artificial Sequence
  Description of Artificial Sequence: Synthetic oligonucleotide
  Antisense strand to SEQ ID NO: 2583056
ucauggccuaggauuuccu

SEQ ID NO: 2583058 - RNA, 19 nt, Artificial Sequence
  Description of Artificial Sequence: Synthetic oligonucleotide
  Sense strand starting at position 3269 of SEQ ID NO: 1889172
aauccuaggccaugaggaa

SEQ ID NO: 2583059 - RNA, 19 nt, Artificial Sequence
  Description of Artificial Sequence: Synthetic oligonucleotide
  Antisense strand to SEQ ID NO: 2583058
uuccucauggccuaggauu

SEQ ID NO: 2583060 - RNA, 19 nt, Artificial Sequence
  Description of Artificial Sequence: Synthetic oligonucleotide
  Sense strand starting at position 3475 of SEQ ID NO: 1889172
ugaacugcuucugcaauua

SEQ ID NO: 2583061 - RNA, 19 nt, Artificial Sequence
  Description of Artificial Sequence: Synthetic oligonucleotide
  Antisense strand to SEQ ID NO: 2583060
uaauugcagaagcaguuca

SEQ ID NO: 2583062 - RNA, 19 nt, Artificial Sequence
  Description of Artificial Sequence: Synthetic oligonucleotide
  Sense strand starting at position 3528 of SEQ ID NO: 1889172
gcgucaucagucuucacgu

SEQ ID NO: 2583063 - RNA, 19 nt, Artificial Sequence
  Description of Artificial Sequence: Synthetic oligonucleotide
  Antisense strand to SEQ ID NO: 2583062
acgugaagacugaugacgc

SEQ ID NO: 2583064 - RNA, 19 nt, Artificial Sequence
  Description of Artificial Sequence: Synthetic oligonucleotide
  Sense strand starting at position 3632 of SEQ ID NO: 1889172
cucucuguccuagaaugaa

SEQ ID NO: 2583065 - RNA, 19 nt, Artificial Sequence
  Description of Artificial Sequence: Synthetic oligonucleotide
  Antisense strand to SEQ ID NO: 2583064
uucauucuaggacagagag

SEQ ID NO: 2583066 - RNA, 19 nt, Artificial Sequence
  Description of Artificial Sequence: Synthetic oligonucleotide
  Sense strand starting at position 3635 of SEQ ID NO: 1889172
ucuguccuagaaugaaauc

SEQ ID NO: 2583067 - RNA, 19 nt, Artificial Sequence
  Description of Artificial Sequence: Synthetic oligonucleotide
  Antisense strand to SEQ ID NO: 2583066
gauuucauucuaggacaga

SEQ ID NO: 2583068 - RNA, 19 nt, Artificial Sequence
  Description of Artificial Sequence: Synthetic oligonucleotide
  Sense strand starting at position 3936 of SEQ ID NO: 1889172
ggaaguguugccgugcguu

SEQ ID NO: 2583069 - RNA, 19 nt, Artificial Sequence
  Description of Artificial Sequence: Synthetic oligonucleotide
  Antisense strand to SEQ ID NO: 2583068
aacgcacggcaacacuucc

SEQ ID NO: 2583070 - RNA, 19 nt, Artificial Sequence
  Description of Artificial Sequence: Synthetic oligonucleotide
  Sense strand starting at position 245 of SEQ ID NO: 1889173
guugaaucccagugaaagc

SEQ ID NO: 2583071 - RNA, 19 nt, Artificial Sequence
  Description of Artificial Sequence: Synthetic oligonucleotide
  Antisense strand to SEQ ID NO: 2583070
gcuuucacugggauucaac

SEQ ID NO: 2583072 - RNA, 19 nt, Artificial Sequence
  Description of Artificial Sequence: Synthetic oligonucleotide
  Sense strand starting at position 290 of SEQ ID NO: 1889173
gaaggcuugccugagagaa

SEQ ID NO: 2583073 - RNA, 19 nt, Artificial Sequence
  Description of Artificial Sequence: Synthetic oligonucleotide
  Antisense strand to SEQ ID NO: 2583072
uucucucaggcaagccuuc

SEQ ID NO: 2583074 - RNA, 19 nt, Artificial Sequence
  Description of Artificial Sequence: Synthetic oligonucleotide
  Sense strand starting at position 330 of SEQ ID NO: 1889173
ucaagcuuuguugaauaau

SEQ ID NO: 2583075 - RNA, 19 nt, Artificial Sequence
  Description of Artificial Sequence: Synthetic oligonucleotide
  Antisense strand to SEQ ID NO: 2583074
auuauucaacaaagcuuga

SEQ ID NO: 2583076 - RNA, 19 nt, Artificial Sequence
  Description of Artificial Sequence: Synthetic oligonucleotide
  Sense strand starting at position 339 of SEQ ID NO: 1889173
guugaauaauuccugucag

SEQ ID NO: 2583077 - RNA, 19 nt, Artificial Sequence
  Description of Artificial Sequence: Synthetic oligonucleotide
  Antisense strand to SEQ ID NO: 2583076
cugacaggaauuauucaac

SEQ ID NO: 2583078 - RNA, 19 nt, Artificial Sequence
  Description of Artificial Sequence: Synthetic oligonucleotide
  Sense strand starting at position 392 of SEQ ID NO: 1889173
cucagcucccacuaugaga

SEQ ID NO: 2583079 - RNA, 19 nt, Artificial Sequence
  Description of Artificial Sequence: Synthetic oligonucleotide
  Antisense strand to SEQ ID NO: 2583078
ucucauagugggagcugag

SEQ ID NO: 2583080 - RNA, 19 nt, Artificial Sequence
  Description of Artificial Sequence: Synthetic oligonucleotide
  Sense strand starting at position 554 of SEQ ID NO: 1889173
ucugauaguagugggugaa

SEQ ID NO: 2583081 - RNA, 19 nt, Artificial Sequence
  Description of Artificial Sequence: Synthetic oligonucleotide
  Antisense strand to SEQ ID NO: 2583080
uucacccacuacuaucaga

SEQ ID NO: 2583082 - RNA, 19 nt, Artificial Sequence
  Description of Artificial Sequence: Synthetic oligonucleotide
  Sense strand starting at position 709 of SEQ ID NO: 1889173
uucugaaauguuuaaugug

SEQ ID NO: 2583083 - RNA, 19 nt, Artificial Sequence
  Description of Artificial Sequence: Synthetic oligonucleotide
  Antisense strand to SEQ ID NO: 2583082
cacauuaaacauuucagaa

SEQ ID NO: 2583084 - RNA, 19 nt, Artificial Sequence
  Description of Artificial Sequence: Synthetic oligonucleotide
  Sense strand starting at position 788 of SEQ ID NO: 1889173
agaagaggccauuguggaa

SEQ ID NO: 2583085 - RNA, 19 nt, Artificial Sequence
  Description of Artificial Sequence: Synthetic oligonucleotide
  Antisense strand to SEQ ID NO: 2583084
uuccacaauggccucuucu

SEQ ID NO: 2583086 - RNA, 19 nt, Artificial Sequence
  Description of Artificial Sequence: Synthetic oligonucleotide
  Sense strand starting at position 841 of SEQ ID NO: 1889173
acauuugacucuggguaua

SEQ ID NO: 2583087 - RNA, 19 nt, Artificial Sequence
  Description of Artificial Sequence: Synthetic oligonucleotide
  Antisense strand to SEQ ID NO: 2583086
uauacccagagucaaaugu

SEQ ID NO: 2583088 - RNA, 19 nt, Artificial Sequence
  Description of Artificial Sequence: Synthetic oligonucleotide
  Sense strand starting at position 864 of SEQ ID NO: 1889173
gccucaaauccagaguuug

SEQ ID NO: 2583089 - RNA, 19 nt, Artificial Sequence
  Description of Artificial Sequence: Synthetic oligonucleotide
  Antisense strand to SEQ ID NO: 2583088
caaacucuggauuugaggc

SEQ ID NO: 2583090 - RNA, 19 nt, Artificial Sequence
  Description of Artificial Sequence: Synthetic oligonucleotide
  Sense strand starting at position 959 of SEQ ID NO: 1889173
cagacagauugugcaauua

SEQ ID NO: 2583091 - RNA, 19 nt, Artificial Sequence
  Description of Artificial Sequence: Synthetic oligonucleotide
  Antisense strand to SEQ ID NO: 2583090
uaauugcacaaucugucug

SEQ ID NO: 2583092 - RNA, 19 nt, Artificial Sequence
  Description of Artificial Sequence: Synthetic oligonucleotide
  Sense strand starting at position 1740 of SEQ ID NO: 1889173
gggaacaugugggcuguaa

SEQ ID NO: 2583093 - RNA, 19 nt, Artificial Sequence
  Description of Artificial Sequence: Synthetic oligonucleotide
  Antisense strand to SEQ ID NO: 2583092
uuacagcccacauguuccc

SEQ ID NO: 2583094 - RNA, 19 nt, Artificial Sequence
  Description of Artificial Sequence: Synthetic oligonucleotide
  Sense strand starting at position 1742 of SEQ ID NO: 1889173
gaacaugugggcuguaacu

SEQ ID NO: 2583095 - RNA, 19 nt, Artificial Sequence
  Description of Artificial Sequence: Synthetic oligonucleotide
  Antisense strand to SEQ ID NO: 2583094
aguuacagcccacauguuc

SEQ ID NO: 2583096 - RNA, 19 nt, Artificial Sequence
  Description of Artificial Sequence: Synthetic oligonucleotide
  Sense strand starting at position 1748 of SEQ ID NO: 1889173
gugggcuguaacuagaaau

SEQ ID NO: 2583097 - RNA, 19 nt, Artificial Sequence
  Description of Artificial Sequence: Synthetic oligonucleotide
  Antisense strand to SEQ ID NO: 2583096
auuucuaguuacagcccac

SEQ ID NO: 2583098 - RNA, 19 nt, Artificial Sequence
  Description of Artificial Sequence: Synthetic oligonucleotide
  Sense strand starting at position 2211 of SEQ ID NO: 1889173
gcuagaagccauggucaga

SEQ ID NO: 2583099 - RNA, 19 nt, Artificial Sequence
  Description of Artificial Sequence: Synthetic oligonucleotide
  Antisense strand to SEQ ID NO: 2583098
ucugaccauggcuucuagc

SEQ ID NO: 2583100 - RNA, 19 nt, Artificial Sequence
  Description of Artificial Sequence: Synthetic oligonucleotide
  Sense strand starting at position 2323 of SEQ ID NO: 1889173
ggaaacugcucuuccuacu

SEQ ID NO: 2583101 - RNA, 19 nt, Artificial Sequence
  Description of Artificial Sequence: Synthetic oligonucleotide
  Antisense strand to SEQ ID NO: 2583100
aguaggaagagcaguuucc

SEQ ID NO: 2583102 - RNA, 19 nt, Artificial Sequence
  Description of Artificial Sequence: Synthetic oligonucleotide
  Sense strand starting at position 2371 of SEQ ID NO: 1889173
ucgggucucaugggaauug

SEQ ID NO: 2583103 - RNA, 19 nt, Artificial Sequence
  Description of Artificial Sequence: Synthetic oligonucleotide
  Antisense strand to SEQ ID NO: 2583102
caauucccaugagacccga

SEQ ID NO: 2583104 - RNA, 19 nt, Artificial Sequence
  Description of Artificial Sequence: Synthetic oligonucleotide
  Sense strand starting at position 2414 of SEQ ID NO: 1889173
ggguucuuugggugagaga

SEQ ID NO: 2583105 - RNA, 19 nt, Artificial Sequence
  Description of Artificial Sequence: Synthetic oligonucleotide
  Antisense strand to SEQ ID NO: 2583104
ucucucacccaaagaaccc

SEQ ID NO: 2583106 - RNA, 19 nt, Artificial Sequence
  Description of Artificial Sequence: Synthetic oligonucleotide
  Sense strand starting at position 2423 of SEQ ID NO: 1889173
gggugagagaauuauacgu

SEQ ID NO: 2583107 - RNA, 19 nt, Artificial Sequence
  Description of Artificial Sequence: Synthetic oligonucleotide
  Antisense strand to SEQ ID NO: 2583106
acguauaauucucucaccc

SEQ ID NO: 2583108 - RNA, 19 nt, Artificial Sequence
  Description of Artificial Sequence: Synthetic oligonucleotide
  Sense strand starting at position 2428 of SEQ ID NO: 1889173
agagaauuauacgugagac

SEQ ID NO: 2583109 - RNA, 19 nt, Artificial Sequence
  Description of Artificial Sequence: Synthetic oligonucleotide
  Antisense strand to SEQ ID NO: 2583108
gucucacguauaauucucu

SEQ ID NO: 2583110 - RNA, 19 nt, Artificial Sequence
  Description of Artificial Sequence: Synthetic oligonucleotide
  Sense strand starting at position 2447 of SEQ ID NO: 1889173
cccagagaugggugccaau

SEQ ID NO: 2583111 - RNA, 19 nt, Artificial Sequence
  Description of Artificial Sequence: Synthetic oligonucleotide
  Antisense strand to SEQ ID NO: 2583110
auuggcacccaucucuggg

SEQ ID NO: 2583112 - RNA, 19 nt, Artificial Sequence
  Description of Artificial Sequence: Synthetic oligonucleotide
  Sense strand starting at position 2464 of SEQ ID NO: 1889173
augaaagauggcugggcua

SEQ ID NO: 2583113 - RNA, 19 nt, Artificial Sequence
  Description of Artificial Sequence: Synthetic oligonucleotide
  Antisense strand to SEQ ID NO: 2583112
uagcccagccaucuuucau

SEQ ID NO: 2583114 - RNA, 19 nt, Artificial Sequence
  Description of Artificial Sequence: Synthetic oligonucleotide
  Sense strand starting at position 2686 of SEQ ID NO: 1889173
uacuguggauucucuauga

SEQ ID NO: 2583115 - RNA, 19 nt, Artificial Sequence
  Description of Artificial Sequence: Synthetic oligonucleotide
  Antisense strand to SEQ ID NO: 2583114
ucauagagaauccacagua

SEQ ID NO: 2583116 - RNA, 19 nt, Artificial Sequence
  Description of Artificial Sequence: Synthetic oligonucleotide
  Sense strand starting at position 2690 of SEQ ID NO: 1889173
guggauucucuaugaaaga

SEQ ID NO: 2583117 - RNA, 19 nt, Artificial Sequence
  Description of Artificial Sequence: Synthetic oligonucleotide
  Antisense strand to SEQ ID NO: 2583116
ucuuucauagagaauccac

SEQ ID NO: 2583118 - RNA, 19 nt, Artificial Sequence
  Description of Artificial Sequence: Synthetic oligonucleotide
  Sense strand starting at position 2691 of SEQ ID NO: 1889173
uggauucucuaugaaagaa

SEQ ID NO: 2583119 - RNA, 19 nt, Artificial Sequence
  Description of Artificial Sequence: Synthetic oligonucleotide
  Antisense strand to SEQ ID NO: 2583118
uucuuucauagagaaucca

SEQ ID NO: 2583120 - RNA, 19 nt, Artificial Sequence
  Description of Artificial Sequence: Synthetic oligonucleotide
  Sense strand starting at position 2729 of SEQ ID NO: 1889173
cucagagaaugaccuguuu

SEQ ID NO: 2583121 - RNA, 19 nt, Artificial Sequence
  Description of Artificial Sequence: Synthetic oligonucleotide
  Antisense strand to SEQ ID NO: 2583120
aaacaggucauucucugag

SEQ ID NO: 2583122 - RNA, 19 nt, Artificial Sequence
  Description of Artificial Sequence: Synthetic oligonucleotide
  Sense strand starting at position 2906 of SEQ ID NO: 1889173
gccaauagaucugugguga

SEQ ID NO: 2583123 - RNA, 19 nt, Artificial Sequence
  Description of Artificial Sequence: Synthetic oligonucleotide
  Antisense strand to SEQ ID NO: 2583122
ucaccacagaucuauuggc

SEQ ID NO: 2583124 - RNA, 19 nt, Artificial Sequence
  Description of Artificial Sequence: Synthetic oligonucleotide
  Sense strand starting at position 2907 of SEQ ID NO: 1889173
ccaauagaucuguggugag

SEQ ID NO: 2583125 - RNA, 19 nt, Artificial Sequence
  Description of Artificial Sequence: Synthetic oligonucleotide
  Antisense strand to SEQ ID NO: 2583124
cucaccacagaucuauugg

SEQ ID NO: 2583126 - RNA, 19 nt, Artificial Sequence
  Description of Artificial Sequence: Synthetic oligonucleotide
  Sense strand starting at position 2951 of SEQ ID NO: 1889173
agugaaagaccuuguauac

SEQ ID NO: 2583127 - RNA, 19 nt, Artificial Sequence
  Description of Artificial Sequence: Synthetic oligonucleotide
  Antisense strand to SEQ ID NO: 2583126
guauacaaggucuuucacu

SEQ ID NO: 2583128 - RNA, 19 nt, Artificial Sequence
  Description of Artificial Sequence: Synthetic oligonucleotide
  Sense strand starting at position 2983 of SEQ ID NO: 1889173
uugcauaugcaaugaaaca

SEQ ID NO: 2583129 - RNA, 19 nt, Artificial Sequence
  Description of Artificial Sequence: Synthetic oligonucleotide
  Antisense strand to SEQ ID NO: 2583128
uguuucauugcauaugcaa

SEQ ID NO: 2583130 - RNA, 19 nt, Artificial Sequence
  Description of Artificial Sequence: Synthetic oligonucleotide
  Sense strand starting at position 3003 of SEQ ID NO: 1889173
aggcuagauuuccaggcaa

SEQ ID NO: 2583131 - RNA, 19 nt, Artificial Sequence
  Description of Artificial Sequence: Synthetic oligonucleotide
  Antisense strand to SEQ ID NO: 2583130
uugccuggaaaucuagccu

SEQ ID NO: 2583132 - RNA, 19 nt, Artificial Sequence
  Description of Artificial Sequence: Synthetic oligonucleotide
  Sense strand starting at position 3218 of SEQ ID NO: 1889173
cuccaugaacugugaauug

SEQ ID NO: 2583133 - RNA, 19 nt, Artificial Sequence
  Description of Artificial Sequence: Synthetic oligonucleotide
  Antisense strand to SEQ ID NO: 2583132
caauucacaguucauggag

SEQ ID NO: 2583134 - RNA, 19 nt, Artificial Sequence
  Description of Artificial Sequence: Synthetic oligonucleotide
  Sense strand starting at position 3266 of SEQ ID NO: 1889173
aggaaauccuaggccauga

SEQ ID NO: 2583135 - RNA, 19 nt, Artificial Sequence
  Description of Artificial Sequence: Synthetic oligonucleotide
  Antisense strand to SEQ ID NO: 2583134
ucauggccuaggauuuccu

SEQ ID NO: 2583136 - RNA, 19 nt, Artificial Sequence
  Description of Artificial Sequence: Synthetic oligonucleotide
  Sense strand starting at position 3270 of SEQ ID NO: 1889173
aauccuaggccaugaggaa

SEQ ID NO: 2583137 - RNA, 19 nt, Artificial Sequence
  Description of Artificial Sequence: Synthetic oligonucleotide
  Antisense strand to SEQ ID NO: 2583136
uuccucauggccuaggauu

SEQ ID NO: 2583138 - RNA, 19 nt, Artificial Sequence
  Description of Artificial Sequence: Synthetic oligonucleotide
  Sense strand starting at position 3476 of SEQ ID NO: 1889173
ugaacugcuucugcaauua

SEQ ID NO: 2583139 - RNA, 19 nt, Artificial Sequence
  Description of Artificial Sequence: Synthetic oligonucleotide
  Antisense strand to SEQ ID NO: 2583138
uaauugcagaagcaguuca

SEQ ID NO: 2583140 - RNA, 19 nt, Artificial Sequence
  Description of Artificial Sequence: Synthetic oligonucleotide
  Sense strand starting at position 3529 of SEQ ID NO: 1889173
gcgucaucagucuucacgu

SEQ ID NO: 2583141 - RNA, 19 nt, Artificial Sequence
  Description of Artificial Sequence: Synthetic oligonucleotide
  Antisense strand to SEQ ID NO: 2583140
acgugaagacugaugacgc

SEQ ID NO: 2583142 - RNA, 19 nt, Artificial Sequence
  Description of Artificial Sequence: Synthetic oligonucleotide
  Sense strand starting at position 3633 of SEQ ID NO: 1889173
cucucuguccuagaaugaa

SEQ ID NO: 2583143 - RNA, 19 nt, Artificial Sequence
  Description of Artificial Sequence: Synthetic oligonucleotide
  Antisense strand to SEQ ID NO: 2583142
uucauucuaggacagagag

SEQ ID NO: 2583144 - RNA, 19 nt, Artificial Sequence
  Description of Artificial Sequence: Synthetic oligonucleotide
  Sense strand starting at position 3636 of SEQ ID NO: 1889173
ucuguccuagaaugaaauc

SEQ ID NO: 2583145 - RNA, 19 nt, Artificial Sequence
  Description of Artificial Sequence: Synthetic oligonucleotide
  Antisense strand to SEQ ID NO: 2583144
gauuucauucuaggacaga

SEQ ID NO: 2583146 - RNA, 19 nt, Artificial Sequence
  Description of Artificial Sequence: Synthetic oligonucleotide
  Sense strand starting at position 3937 of SEQ ID NO: 1889173
ggaaguguugccgugcguu

SEQ ID NO: 2583147 - RNA, 19 nt, Artificial Sequence
  Description of Artificial Sequence: Synthetic oligonucleotide
  Antisense strand to SEQ ID NO: 2583146
aacgcacggcaacacuucc

SEQ ID NO: 2583148 - RNA, 19 nt, Artificial Sequence
  Description of Artificial Sequence: Synthetic oligonucleotide
  Sense strand starting at position 3939 of SEQ ID NO: 1889173
aaguguugccgugcguuau

SEQ ID NO: 2583149 - RNA, 19 nt, Artificial Sequence
  Description of Artificial Sequence: Synthetic oligonucleotide
  Antisense strand to SEQ ID NO: 2583148
auaacgcacggcaacacuu

SEQ ID NO: 2583150 - RNA, 19 nt, Artificial Sequence
  Description of Artificial Sequence: Synthetic oligonucleotide
  Sense strand starting at position 45 of SEQ ID NO: 1889174
uuauauuaucuccagugua

SEQ ID NO: 2583151 - RNA, 19 nt, Artificial Sequence
  Description of Artificial Sequence: Synthetic oligonucleotide
  Antisense strand to SEQ ID NO: 2583150
uacacuggagauaauauaa

SEQ ID NO: 2583152 - RNA, 19 nt, Artificial Sequence
  Description of Artificial Sequence: Synthetic oligonucleotide
  Sense strand starting at position 256 of SEQ ID NO: 1889174
aaguuaaaugagugcauua

SEQ ID NO: 2583153 - RNA, 19 nt, Artificial Sequence
  Description of Artificial Sequence: Synthetic oligonucleotide
  Antisense strand to SEQ ID NO: 2583152
uaaugcacucauuuaacuu

SEQ ID NO: 2583154 - RNA, 19 nt, Artificial Sequence
  Description of Artificial Sequence: Synthetic oligonucleotide
  Sense strand starting at position 258 of SEQ ID NO: 1889174
guuaaaugagugcauuacu

SEQ ID NO: 2583155 - RNA, 19 nt, Artificial Sequence
  Description of Artificial Sequence: Synthetic oligonucleotide
  Antisense strand to SEQ ID NO: 2583154
aguaaugcacucauuuaac

SEQ ID NO: 2583156 - RNA, 19 nt, Artificial Sequence
  Description of Artificial Sequence: Synthetic oligonucleotide
  Sense strand starting at position 261 of SEQ ID NO: 1889174
aaaugagugcauuacugau

SEQ ID NO: 2583157 - RNA, 19 nt, Artificial Sequence
  Description of Artificial Sequence: Synthetic oligonucleotide
  Antisense strand to SEQ ID NO: 2583156
aucaguaaugcacucauuu

SEQ ID NO: 2583158 - RNA, 19 nt, Artificial Sequence
  Description of Artificial Sequence: Synthetic oligonucleotide
  Sense strand starting at position 464 of SEQ ID NO: 1889174
uuugguaacaguuauggua

SEQ ID NO: 2583159 - RNA, 19 nt, Artificial Sequence
  Description of Artificial Sequence: Synthetic oligonucleotide
  Antisense strand to SEQ ID NO: 2583158
uaccauaacuguuaccaaa

SEQ ID NO: 2583160 - RNA, 19 nt, Artificial Sequence
  Description of Artificial Sequence: Synthetic oligonucleotide
  Sense strand starting at position 580 of SEQ ID NO: 1889174
agugaaauuugccaggaaa

SEQ ID NO: 2583161 - RNA, 19 nt, Artificial Sequence
  Description of Artificial Sequence: Synthetic oligonucleotide
  Antisense strand to SEQ ID NO: 2583160
uuuccuggcaaauuucacu

SEQ ID NO: 2583162 - RNA, 19 nt, Artificial Sequence
  Description of Artificial Sequence: Synthetic oligonucleotide
  Sense strand starting at position 649 of SEQ ID NO: 1889174
guugaucucauauagguag

SEQ ID NO: 2583163 - RNA, 19 nt, Artificial Sequence
  Description of Artificial Sequence: Synthetic oligonucleotide
  Antisense strand to SEQ ID NO: 2583162
cuaccuauaugagaucaac

SEQ ID NO: 2583164 - RNA, 19 nt, Artificial Sequence
  Description of Artificial Sequence: Synthetic oligonucleotide
  Sense strand starting at position 681 of SEQ ID NO: 1889174
agauuauuauaggcuauga

SEQ ID NO: 2583165 - RNA, 19 nt, Artificial Sequence
  Description of Artificial Sequence: Synthetic oligonucleotide
  Antisense strand to SEQ ID NO: 2583164
ucauagccuauaauaaucu

SEQ ID NO: 2583166 - RNA, 19 nt, Artificial Sequence
  Description of Artificial Sequence: Synthetic oligonucleotide
  Sense strand starting at position 710 of SEQ ID NO: 1889174
gcaaauaaaugaguuaguu

SEQ ID NO: 2583167 - RNA, 19 nt, Artificial Sequence
  Description of Artificial Sequence: Synthetic oligonucleotide
  Antisense strand to SEQ ID NO: 2583166
aacuaacucauuuauuugc

SEQ ID NO: 2583168 - RNA, 19 nt, Artificial Sequence
  Description of Artificial Sequence: Synthetic oligonucleotide
  Sense strand starting at position 785 of SEQ ID NO: 1889174
agguuauagguaugaauaa

SEQ ID NO: 2583169 - RNA, 19 nt, Artificial Sequence
  Description of Artificial Sequence: Synthetic oligonucleotide
  Antisense strand to SEQ ID NO: 2583168
uuauucauaccuauaaccu

SEQ ID NO: 2583170 - RNA, 19 nt, Artificial Sequence
  Description of Artificial Sequence: Synthetic oligonucleotide
  Sense strand starting at position 869 of SEQ ID NO: 1889174
auaugucggaaaugacuaa

SEQ ID NO: 2583171 - RNA, 19 nt, Artificial Sequence
  Description of Artificial Sequence: Synthetic oligonucleotide
  Antisense strand to SEQ ID NO: 2583170
uuagucauuuccgacauau

SEQ ID NO: 2583172 - RNA, 19 nt, Artificial Sequence
  Description of Artificial Sequence: Synthetic oligonucleotide
  Sense strand starting at position 1088 of SEQ ID NO: 1889174
gggacuuugugauccaaau

SEQ ID NO: 2583173 - RNA, 19 nt, Artificial Sequence
  Description of Artificial Sequence: Synthetic oligonucleotide
  Antisense strand to SEQ ID NO: 2583172
auuuggaucacaaaguccc

SEQ ID NO: 2583174 - RNA, 19 nt, Artificial Sequence
  Description of Artificial Sequence: Synthetic oligonucleotide
  Sense strand starting at position 1281 of SEQ ID NO: 1889174
ugagacagcuucuuugacu

SEQ ID NO: 2583175 - RNA, 19 nt, Artificial Sequence
  Description of Artificial Sequence: Synthetic oligonucleotide
  Antisense strand to SEQ ID NO: 2583174
agucaaagaagcugucuca

SEQ ID NO: 2583176 - RNA, 19 nt, Artificial Sequence
  Description of Artificial Sequence: Synthetic oligonucleotide
  Sense strand starting at position 1282 of SEQ ID NO: 1889174
gagacagcuucuuugacug

SEQ ID NO: 2583177 - RNA, 19 nt, Artificial Sequence
  Description of Artificial Sequence: Synthetic oligonucleotide
  Antisense strand to SEQ ID NO: 2583176
cagucaaagaagcugucuc

SEQ ID NO: 2583178 - RNA, 19 nt, Artificial Sequence
  Description of Artificial Sequence: Synthetic oligonucleotide
  Sense strand starting at position 1337 of SEQ ID NO: 1889174
uaaaguguugggcaaauua

SEQ ID NO: 2583179 - RNA, 19 nt, Artificial Sequence
  Description of Artificial Sequence: Synthetic oligonucleotide
  Antisense strand to SEQ ID NO: 2583178
uaauuugcccaacacuuua

SEQ ID NO: 2583180 - RNA, 19 nt, Artificial Sequence
  Description of Artificial Sequence: Synthetic oligonucleotide
  Sense strand starting at position 1435 of SEQ ID NO: 1889174
agggaagugcaaugagaug

SEQ ID NO: 2583181 - RNA, 19 nt, Artificial Sequence
  Description of Artificial Sequence: Synthetic oligonucleotide
  Antisense strand to SEQ ID NO: 2583180
caucucauugcacuucccu

SEQ ID NO: 2583182 - RNA, 19 nt, Artificial Sequence
  Description of Artificial Sequence: Synthetic oligonucleotide
  Sense strand starting at position 1440 of SEQ ID NO: 1889174
agugcaaugagaugaugau

SEQ ID NO: 2583183 - RNA, 19 nt, Artificial Sequence
  Description of Artificial Sequence: Synthetic oligonucleotide
  Antisense strand to SEQ ID NO: 2583182
aucaucaucucauugcacu

SEQ ID NO: 2583184 - RNA, 19 nt, Artificial Sequence
  Description of Artificial Sequence: Synthetic oligonucleotide
  Sense strand starting at position 1580 of SEQ ID NO: 1889174
accugcuuaguugaugaau

SEQ ID NO: 2583185 - RNA, 19 nt, Artificial Sequence
  Description of Artificial Sequence: Synthetic oligonucleotide
  Antisense strand to SEQ ID NO: 2583184
auucaucaacuaagcaggu

SEQ ID NO: 2583186 - RNA, 19 nt, Artificial Sequence
  Description of Artificial Sequence: Synthetic oligonucleotide
  Sense strand starting at position 1678 of SEQ ID NO: 1889174
augaguaaauuagcucaau

SEQ ID NO: 2583187 - RNA, 19 nt, Artificial Sequence
  Description of Artificial Sequence: Synthetic oligonucleotide
  Antisense strand to SEQ ID NO: 2583186
auugagcuaauuuacucau

SEQ ID NO: 2583188 - RNA, 19 nt, Artificial Sequence
  Description of Artificial Sequence: Synthetic oligonucleotide
  Sense strand starting at position 1679 of SEQ ID NO: 1889174
ugaguaaauuagcucaaug

SEQ ID NO: 2583189 - RNA, 19 nt, Artificial Sequence
  Description of Artificial Sequence: Synthetic oligonucleotide
  Antisense strand to SEQ ID NO: 2583188
cauugagcuaauuuacuca

SEQ ID NO: 2583190 - RNA, 19 nt, Artificial Sequence
  Description of Artificial Sequence: Synthetic oligonucleotide
  Sense strand starting at position 1681 of SEQ ID NO: 1889174
aguaaauuagcucaaugau

SEQ ID NO: 2583191 - RNA, 19 nt, Artificial Sequence
  Description of Artificial Sequence: Synthetic oligonucleotide
  Antisense strand to SEQ ID NO: 2583190
aucauugagcuaauuuacu

SEQ ID NO: 2583192 - RNA, 19 nt, Artificial Sequence
  Description of Artificial Sequence: Synthetic oligonucleotide
  Sense strand starting at position 1751 of SEQ ID NO: 1889174
augagucguaaacaguaau

SEQ ID NO: 2583193 - RNA, 19 nt, Artificial Sequence
  Description of Artificial Sequence: Synthetic oligonucleotide
  Antisense strand to SEQ ID NO: 2583192
auuacuguuuacgacucau

SEQ ID NO: 2583194 - RNA, 19 nt, Artificial Sequence
  Description of Artificial Sequence: Synthetic oligonucleotide
  Sense strand starting at position 1811 of SEQ ID NO: 1889174
aacagaugccaguauguga

SEQ ID NO: 2583195 - RNA, 19 nt, Artificial Sequence
  Description of Artificial Sequence: Synthetic oligonucleotide
  Antisense strand to SEQ ID NO: 2583194
ucacauacuggcaucuguu

SEQ ID NO: 2583196 - RNA, 19 nt, Artificial Sequence
  Description of Artificial Sequence: Synthetic oligonucleotide
  Sense strand starting at position 1926 of SEQ ID NO: 1889174
gaagaaucuucugcaggau

SEQ ID NO: 2583197 - RNA, 19 nt, Artificial Sequence
  Description of Artificial Sequence: Synthetic oligonucleotide
  Antisense strand to SEQ ID NO: 2583196
auccugcagaagauucuuc

SEQ ID NO: 2583198 - RNA, 19 nt, Artificial Sequence
  Description of Artificial Sequence: Synthetic oligonucleotide
  Sense strand starting at position 1929 of SEQ ID NO: 1889174
gaaucuucugcaggaugau

SEQ ID NO: 2583199 - RNA, 19 nt, Artificial Sequence
  Description of Artificial Sequence: Synthetic oligonucleotide
  Antisense strand to SEQ ID NO: 2583198
aucauccugcagaagauuc

SEQ ID NO: 2583200 - RNA, 19 nt, Artificial Sequence
  Description of Artificial Sequence: Synthetic oligonucleotide
  Sense strand starting at position 1941 of SEQ ID NO: 1889174
ggaugauugggaggucauu

SEQ ID NO: 2583201 - RNA, 19 nt, Artificial Sequence
  Description of Artificial Sequence: Synthetic oligonucleotide
  Antisense strand to SEQ ID NO: 2583200
aaugaccucccaaucaucc

SEQ ID NO: 2583202 - RNA, 19 nt, Artificial Sequence
  Description of Artificial Sequence: Synthetic oligonucleotide
  Sense strand starting at position 2486 of SEQ ID NO: 1889174
cuaggagacuuacugcuuu

SEQ ID NO: 2583203 - RNA, 19 nt, Artificial Sequence
  Description of Artificial Sequence: Synthetic oligonucleotide
  Antisense strand to SEQ ID NO: 2583202
aaagcaguaagucuccuag

SEQ ID NO: 2583204 - RNA, 19 nt, Artificial Sequence
  Description of Artificial Sequence: Synthetic oligonucleotide
  Sense strand starting at position 2535 of SEQ ID NO: 1889174
gucagaaaucuuggcacaa

SEQ ID NO: 2583205 - RNA, 19 nt, Artificial Sequence
  Description of Artificial Sequence: Synthetic oligonucleotide
  Antisense strand to SEQ ID NO: 2583204
uugugccaagauuucugac

SEQ ID NO: 2583206 - RNA, 19 nt, Artificial Sequence
  Description of Artificial Sequence: Synthetic oligonucleotide
  Sense strand starting at position 2536 of SEQ ID NO: 1889174
ucagaaaucuuggcacaau

SEQ ID NO: 2583207 - RNA, 19 nt, Artificial Sequence
  Description of Artificial Sequence: Synthetic oligonucleotide
  Antisense strand to SEQ ID NO: 2583206
auugugccaagauuucuga

SEQ ID NO: 2583208 - RNA, 19 nt, Artificial Sequence
  Description of Artificial Sequence: Synthetic oligonucleotide
  Sense strand starting at position 2539 of SEQ ID NO: 1889174
gaaaucuuggcacaauggu

SEQ ID NO: 2583209 - RNA, 19 nt, Artificial Sequence
  Description of Artificial Sequence: Synthetic oligonucleotide
  Antisense strand to SEQ ID NO: 2583208
accauugugccaagauuuc

SEQ ID NO: 2583210 - RNA, 19 nt, Artificial Sequence
  Description of Artificial Sequence: Synthetic oligonucleotide
  Sense strand starting at position 2595 of SEQ ID NO: 1889174
acuggaauuaggugaagca

SEQ ID NO: 2583211 - RNA, 19 nt, Artificial Sequence
  Description of Artificial Sequence: Synthetic oligonucleotide
  Antisense strand to SEQ ID NO: 2583210
ugcuucaccuaauuccagu

SEQ ID NO: 2583212 - RNA, 19 nt, Artificial Sequence
  Description of Artificial Sequence: Synthetic oligonucleotide
  Sense strand starting at position 2618 of SEQ ID NO: 1889174
uuagaagcaucccuuagua

SEQ ID NO: 2583213 - RNA, 19 nt, Artificial Sequence
  Description of Artificial Sequence: Synthetic oligonucleotide
  Antisense strand to SEQ ID NO: 2583212
uacuaagggaugcuucuaa

SEQ ID NO: 2583214 - RNA, 19 nt, Artificial Sequence
  Description of Artificial Sequence: Synthetic oligonucleotide
  Sense strand starting at position 2620 of SEQ ID NO: 1889174
agaagcaucccuuaguaaa

SEQ ID NO: 2583215 - RNA, 19 nt, Artificial Sequence
  Description of Artificial Sequence: Synthetic oligonucleotide
  Antisense strand to SEQ ID NO: 2583214
uuuacuaagggaugcuucu

SEQ ID NO: 2583216 - RNA, 19 nt, Artificial Sequence
  Description of Artificial Sequence: Synthetic oligonucleotide
  Sense strand starting at position 2774 of SEQ ID NO: 1889174
gcaagaaauuaagcuauca

SEQ ID NO: 2583217 - RNA, 19 nt, Artificial Sequence
  Description of Artificial Sequence: Synthetic oligonucleotide
  Antisense strand to SEQ ID NO: 2583216
ugauagcuuaauuucuugc

SEQ ID NO: 2583218 - RNA, 19 nt, Artificial Sequence
  Description of Artificial Sequence: Synthetic oligonucleotide
  Sense strand starting at position 2786 of SEQ ID NO: 1889174
gcuaucaaacauuaaaggu

SEQ ID NO: 2583219 - RNA, 19 nt, Artificial Sequence
  Description of Artificial Sequence: Synthetic oligonucleotide
  Antisense strand to SEQ ID NO: 2583218
accuuuaauguuugauagc

SEQ ID NO: 2583220 - RNA, 19 nt, Artificial Sequence
  Description of Artificial Sequence: Synthetic oligonucleotide
  Sense strand starting at position 2801 of SEQ ID NO: 1889174
aggugaagaauguguagaa

SEQ ID NO: 2583221 - RNA, 19 nt, Artificial Sequence
  Description of Artificial Sequence: Synthetic oligonucleotide
  Antisense strand to SEQ ID NO: 2583220
uucuacacauucuucaccu

SEQ ID NO: 2583222 - RNA, 19 nt, Artificial Sequence
  Description of Artificial Sequence: Synthetic oligonucleotide
  Sense strand starting at position 2802 of SEQ ID NO: 1889174
ggugaagaauguguagaau

SEQ ID NO: 2583223 - RNA, 19 nt, Artificial Sequence
  Description of Artificial Sequence: Synthetic oligonucleotide
  Antisense strand to SEQ ID NO: 2583222
auucuacacauucuucacc

SEQ ID NO: 2583224 - RNA, 19 nt, Artificial Sequence
  Description of Artificial Sequence: Synthetic oligonucleotide
  Sense strand starting at position 2881 of SEQ ID NO: 1889174
uaagguuucugagcaauag

SEQ ID NO: 2583225 - RNA, 19 nt, Artificial Sequence
  Description of Artificial Sequence: Synthetic oligonucleotide
  Antisense strand to SEQ ID NO: 2583224
cuauugcucagaaaccuua

SEQ ID NO: 2583226 - RNA, 19 nt, Artificial Sequence
  Description of Artificial Sequence: Synthetic oligonucleotide
  Sense strand starting at position 2901 of SEQ ID NO: 1889174
gcuguuacucuggacaacu

SEQ ID NO: 2583227 - RNA, 19 nt, Artificial Sequence
  Description of Artificial Sequence: Synthetic oligonucleotide
  Antisense strand to SEQ ID NO: 2583226
aguuguccagaguaacagc

SEQ ID NO: 2583228 - RNA, 19 nt, Artificial Sequence
  Description of Artificial Sequence: Synthetic oligonucleotide
  Sense strand starting at position 3472 of SEQ ID NO: 1889174
agaagacugcauuacucuu

SEQ ID NO: 2583229 - RNA, 19 nt, Artificial Sequence
  Description of Artificial Sequence: Synthetic oligonucleotide
  Antisense strand to SEQ ID NO: 2583228
aagaguaaugcagucuucu

SEQ ID NO: 2583230 - RNA, 19 nt, Artificial Sequence
  Description of Artificial Sequence: Synthetic oligonucleotide
  Sense strand starting at position 46 of SEQ ID NO: 1889175
uuauauuaucuccagugua

SEQ ID NO: 2583231 - RNA, 19 nt, Artificial Sequence
  Description of Artificial Sequence: Synthetic oligonucleotide
  Antisense strand to SEQ ID NO: 2583230
uacacuggagauaauauaa

SEQ ID NO: 2583232 - RNA, 19 nt, Artificial Sequence
  Description of Artificial Sequence: Synthetic oligonucleotide
  Sense strand starting at position 56 of SEQ ID NO: 1889175
uccaguguagguuauuauu

SEQ ID NO: 2583233 - RNA, 19 nt, Artificial Sequence
  Description of Artificial Sequence: Synthetic oligonucleotide
  Antisense strand to SEQ ID NO: 2583232
aauaauaaccuacacugga

SEQ ID NO: 2583234 - RNA, 19 nt, Artificial Sequence
  Description of Artificial Sequence: Synthetic oligonucleotide
  Sense strand starting at position 259 of SEQ ID NO: 1889175
guuaaaugagugcauuacu

SEQ ID NO: 2583235 - RNA, 19 nt, Artificial Sequence
  Description of Artificial Sequence: Synthetic oligonucleotide
  Antisense strand to SEQ ID NO: 2583234
aguaaugcacucauuuaac

SEQ ID NO: 2583236 - RNA, 19 nt, Artificial Sequence
  Description of Artificial Sequence: Synthetic oligonucleotide
  Sense strand starting at position 262 of SEQ ID NO: 1889175
aaaugagugcauuacugau

SEQ ID NO: 2583237 - RNA, 19 nt, Artificial Sequence
  Description of Artificial Sequence: Synthetic oligonucleotide
  Antisense strand to SEQ ID NO: 2583236
aucaguaaugcacucauuu

SEQ ID NO: 2583238 - RNA, 19 nt, Artificial Sequence
  Description of Artificial Sequence: Synthetic oligonucleotide
  Sense strand starting at position 465 of SEQ ID NO: 1889175
uuugguaacaguuauggua

SEQ ID NO: 2583239 - RNA, 19 nt, Artificial Sequence
  Description of Artificial Sequence: Synthetic oligonucleotide
  Antisense strand to SEQ ID NO: 2583238
uaccauaacuguuaccaaa

SEQ ID NO: 2583240 - RNA, 19 nt, Artificial Sequence
  Description of Artificial Sequence: Synthetic oligonucleotide
  Sense strand starting at position 581 of SEQ ID NO: 1889175
agugaaauuugccaggaaa

SEQ ID NO: 2583241 - RNA, 19 nt, Artificial Sequence
  Description of Artificial Sequence: Synthetic oligonucleotide
  Antisense strand to SEQ ID NO: 2583240
uuuccuggcaaauuucacu

SEQ ID NO: 2583242 - RNA, 19 nt, Artificial Sequence
  Description of Artificial Sequence: Synthetic oligonucleotide
  Sense strand starting at position 650 of SEQ ID NO: 1889175
guugaucucauauagguag

SEQ ID NO: 2583243 - RNA, 19 nt, Artificial Sequence
  Description of Artificial Sequence: Synthetic oligonucleotide
  Antisense strand to SEQ ID NO: 2583242
cuaccuauaugagaucaac

SEQ ID NO: 2583244 - RNA, 19 nt, Artificial Sequence
  Description of Artificial Sequence: Synthetic oligonucleotide
  Sense strand starting at position 669 of SEQ ID NO: 1889175
agaauagaaugacagauua

SEQ ID NO: 2583245 - RNA, 19 nt, Artificial Sequence
  Description of Artificial Sequence: Synthetic oligonucleotide
  Antisense strand to SEQ ID NO: 2583244
uaaucugucauucuauucu

SEQ ID NO: 2583246 - RNA, 19 nt, Artificial Sequence
  Description of Artificial Sequence: Synthetic oligonucleotide
  Sense strand starting at position 682 of SEQ ID NO: 1889175
agauuauuauaggcuauga

SEQ ID NO: 2583247 - RNA, 19 nt, Artificial Sequence
  Description of Artificial Sequence: Synthetic oligonucleotide
  Antisense strand to SEQ ID NO: 2583246
ucauagccuauaauaaucu

SEQ ID NO: 2583248 - RNA, 19 nt, Artificial Sequence
  Description of Artificial Sequence: Synthetic oligonucleotide
  Sense strand starting at position 711 of SEQ ID NO: 1889175
gcaaauaaaugaguuaguu

SEQ ID NO: 2583249 - RNA, 19 nt, Artificial Sequence
  Description of Artificial Sequence: Synthetic oligonucleotide
  Antisense strand to SEQ ID NO: 2583248
aacuaacucauuuauuugc

SEQ ID NO: 2583250 - RNA, 19 nt, Artificial Sequence
  Description of Artificial Sequence: Synthetic oligonucleotide
  Sense strand starting at position 786 of SEQ ID NO: 1889175
agguuauagguaugaauaa

SEQ ID NO: 2583251 - RNA, 19 nt, Artificial Sequence
  Description of Artificial Sequence: Synthetic oligonucleotide
  Antisense strand to SEQ ID NO: 2583250
uuauucauaccuauaaccu

SEQ ID NO: 2583252 - RNA, 19 nt, Artificial Sequence
  Description of Artificial Sequence: Synthetic oligonucleotide
  Sense strand starting at position 870 of SEQ ID NO: 1889175
auaugucggaaaugacuaa

SEQ ID NO: 2583253 - RNA, 19 nt, Artificial Sequence
  Description of Artificial Sequence: Synthetic oligonucleotide
  Antisense strand to SEQ ID NO: 2583252
uuagucauuuccgacauau

SEQ ID NO: 2583254 - RNA, 19 nt, Artificial Sequence
  Description of Artificial Sequence: Synthetic oligonucleotide
  Sense strand starting at position 1003 of SEQ ID NO: 1889175
augauaaauaguggucugu

SEQ ID NO: 2583255 - RNA, 19 nt, Artificial Sequence
  Description of Artificial Sequence: Synthetic oligonucleotide
  Antisense strand to SEQ ID NO: 2583254
acagaccacuauuuaucau

SEQ ID NO: 2583256 - RNA, 19 nt, Artificial Sequence
  Description of Artificial Sequence: Synthetic oligonucleotide
  Sense strand starting at position 1089 of SEQ ID NO: 1889175
gggacuuugugauccaaau

SEQ ID NO: 2583257 - RNA, 19 nt, Artificial Sequence
  Description of Artificial Sequence: Synthetic oligonucleotide
  Antisense strand to SEQ ID NO: 2583256
auuuggaucacaaaguccc

SEQ ID NO: 2583258 - RNA, 19 nt, Artificial Sequence
  Description of Artificial Sequence: Synthetic oligonucleotide
  Sense strand starting at position 1282 of SEQ ID NO: 1889175
ugagacagcuucuuugacu

SEQ ID NO: 2583259 - RNA, 19 nt, Artificial Sequence
  Description of Artificial Sequence: Synthetic oligonucleotide
  Antisense strand to SEQ ID NO: 2583258
agucaaagaagcugucuca

SEQ ID NO: 2583260 - RNA, 19 nt, Artificial Sequence
  Description of Artificial Sequence: Synthetic oligonucleotide
  Sense strand starting at position 1283 of SEQ ID NO: 1889175
gagacagcuucuuugacug

SEQ ID NO: 2583261 - RNA, 19 nt, Artificial Sequence
  Description of Artificial Sequence: Synthetic oligonucleotide
  Antisense strand to SEQ ID NO: 2583260
cagucaaagaagcugucuc

SEQ ID NO: 2583262 - RNA, 19 nt, Artificial Sequence
  Description of Artificial Sequence: Synthetic oligonucleotide
  Sense strand starting at position 1338 of SEQ ID NO: 1889175
uaaaguguugggcaaauua

SEQ ID NO: 2583263 - RNA, 19 nt, Artificial Sequence
  Description of Artificial Sequence: Synthetic oligonucleotide
  Antisense strand to SEQ ID NO: 2583262
uaauuugcccaacacuuua

SEQ ID NO: 2583264 - RNA, 19 nt, Artificial Sequence
  Description of Artificial Sequence: Synthetic oligonucleotide
  Sense strand starting at position 1436 of SEQ ID NO: 1889175
agggaagugcaaugagaug

SEQ ID NO: 2583265 - RNA, 19 nt, Artificial Sequence
  Description of Artificial Sequence: Synthetic oligonucleotide
  Antisense strand to SEQ ID NO: 2583264
caucucauugcacuucccu

SEQ ID NO: 2583266 - RNA, 19 nt, Artificial Sequence
  Description of Artificial Sequence: Synthetic oligonucleotide
  Sense strand starting at position 1441 of SEQ ID NO: 1889175
agugcaaugagaugaugau

SEQ ID NO: 2583267 - RNA, 19 nt, Artificial Sequence
  Description of Artificial Sequence: Synthetic oligonucleotide
  Antisense strand to SEQ ID NO: 2583266
aucaucaucucauugcacu

SEQ ID NO: 2583268 - RNA, 19 nt, Artificial Sequence
  Description of Artificial Sequence: Synthetic oligonucleotide
  Sense strand starting at position 1581 of SEQ ID NO: 1889175
accugcuuaguugaugaau

SEQ ID NO: 2583269 - RNA, 19 nt, Artificial Sequence
  Description of Artificial Sequence: Synthetic oligonucleotide
  Antisense strand to SEQ ID NO: 2583268
auucaucaacuaagcaggu

SEQ ID NO: 2583270 - RNA, 19 nt, Artificial Sequence
  Description of Artificial Sequence: Synthetic oligonucleotide
  Sense strand starting at position 1679 of SEQ ID NO: 1889175
augaguaaauuagcucaau

SEQ ID NO: 2583271 - RNA, 19 nt, Artificial Sequence
  Description of Artificial Sequence: Synthetic oligonucleotide
  Antisense strand to SEQ ID NO: 2583270
auugagcuaauuuacucau

SEQ ID NO: 2583272 - RNA, 19 nt, Artificial Sequence
  Description of Artificial Sequence: Synthetic oligonucleotide
  Sense strand starting at position 1680 of SEQ ID NO: 1889175
ugaguaaauuagcucaaug

SEQ ID NO: 2583273 - RNA, 19 nt, Artificial Sequence
  Description of Artificial Sequence: Synthetic oligonucleotide
  Antisense strand to SEQ ID NO: 2583272
cauugagcuaauuuacuca

SEQ ID NO: 2583274 - RNA, 19 nt, Artificial Sequence
  Description of Artificial Sequence: Synthetic oligonucleotide
  Sense strand starting at position 1682 of SEQ ID NO: 1889175
aguaaauuagcucaaugau

SEQ ID NO: 2583275 - RNA, 19 nt, Artificial Sequence
  Description of Artificial Sequence: Synthetic oligonucleotide
  Antisense strand to SEQ ID NO: 2583274
aucauugagcuaauuuacu

SEQ ID NO: 2583276 - RNA, 19 nt, Artificial Sequence
  Description of Artificial Sequence: Synthetic oligonucleotide
  Sense strand starting at position 1752 of SEQ ID NO: 1889175
augagucguaaacaguaau

SEQ ID NO: 2583277 - RNA, 19 nt, Artificial Sequence
  Description of Artificial Sequence: Synthetic oligonucleotide
  Antisense strand to SEQ ID NO: 2583276
auuacuguuuacgacucau

SEQ ID NO: 2583278 - RNA, 19 nt, Artificial Sequence
  Description of Artificial Sequence: Synthetic oligonucleotide
  Sense strand starting at position 1812 of SEQ ID NO: 1889175
aacagaugccaguauguga

SEQ ID NO: 2583279 - RNA, 19 nt, Artificial Sequence
  Description of Artificial Sequence: Synthetic oligonucleotide
  Antisense strand to SEQ ID NO: 2583278
ucacauacuggcaucuguu

SEQ ID NO: 2583280 - RNA, 19 nt, Artificial Sequence
  Description of Artificial Sequence: Synthetic oligonucleotide
  Sense strand starting at position 2012 of SEQ ID NO: 1889175
gcagcaguaaugcagaaau

SEQ ID NO: 2583281 - RNA, 19 nt, Artificial Sequence
  Description of Artificial Sequence: Synthetic oligonucleotide
  Antisense strand to SEQ ID NO: 2583280
auuucugcauuacugcugc

SEQ ID NO: 2583282 - RNA, 19 nt, Artificial Sequence
  Description of Artificial Sequence: Synthetic oligonucleotide
  Sense strand starting at position 2487 of SEQ ID NO: 1889175
cuaggagacuuacugcuuu

SEQ ID NO: 2583283 - RNA, 19 nt, Artificial Sequence
  Description of Artificial Sequence: Synthetic oligonucleotide
  Antisense strand to SEQ ID NO: 2583282
aaagcaguaagucuccuag

SEQ ID NO: 2583284 - RNA, 19 nt, Artificial Sequence
  Description of Artificial Sequence: Synthetic oligonucleotide
  Sense strand starting at position 2536 of SEQ ID NO: 1889175
gucagaaaucuuggcacaa

SEQ ID NO: 2583285 - RNA, 19 nt, Artificial Sequence
  Description of Artificial Sequence: Synthetic oligonucleotide
  Antisense strand to SEQ ID NO: 2583284
uugugccaagauuucugac

SEQ ID NO: 2583286 - RNA, 19 nt, Artificial Sequence
  Description of Artificial Sequence: Synthetic oligonucleotide
  Sense strand starting at position 2537 of SEQ ID NO: 1889175
ucagaaaucuuggcacaau

SEQ ID NO: 2583287 - RNA, 19 nt, Artificial Sequence
  Description of Artificial Sequence: Synthetic oligonucleotide
  Antisense strand to SEQ ID NO: 2583286
auugugccaagauuucuga

SEQ ID NO: 2583288 - RNA, 19 nt, Artificial Sequence
  Description of Artificial Sequence: Synthetic oligonucleotide
  Sense strand starting at position 2540 of SEQ ID NO: 1889175
gaaaucuuggcacaauggu

SEQ ID NO: 2583289 - RNA, 19 nt, Artificial Sequence
  Description of Artificial Sequence: Synthetic oligonucleotide
  Antisense strand to SEQ ID NO: 2583288
accauugugccaagauuuc

SEQ ID NO: 2583290 - RNA, 19 nt, Artificial Sequence
  Description of Artificial Sequence: Synthetic oligonucleotide
  Sense strand starting at position 2596 of SEQ ID NO: 1889175
acuggaauuaggugaagca

SEQ ID NO: 2583291 - RNA, 19 nt, Artificial Sequence
  Description of Artificial Sequence: Synthetic oligonucleotide
  Antisense strand to SEQ ID NO: 2583290
ugcuucaccuaauuccagu

SEQ ID NO: 2583292 - RNA, 19 nt, Artificial Sequence
  Description of Artificial Sequence: Synthetic oligonucleotide
  Sense strand starting at position 2619 of SEQ ID NO: 1889175
uuagaagcaucccuuagua

SEQ ID NO: 2583293 - RNA, 19 nt, Artificial Sequence
  Description of Artificial Sequence: Synthetic oligonucleotide
  Antisense strand to SEQ ID NO: 2583292
uacuaagggaugcuucuaa

SEQ ID NO: 2583294 - RNA, 19 nt, Artificial Sequence
  Description of Artificial Sequence: Synthetic oligonucleotide
  Sense strand starting at position 2621 of SEQ ID NO: 1889175
agaagcaucccuuaguaaa

SEQ ID NO: 2583295 - RNA, 19 nt, Artificial Sequence
  Description of Artificial Sequence: Synthetic oligonucleotide
  Antisense strand to SEQ ID NO: 2583294
uuuacuaagggaugcuucu

SEQ ID NO: 2583296 - RNA, 19 nt, Artificial Sequence
  Description of Artificial Sequence: Synthetic oligonucleotide
  Sense strand starting at position 2775 of SEQ ID NO: 1889175
gcaagaaauuaagcuauca

SEQ ID NO: 2583297 - RNA, 19 nt, Artificial Sequence
  Description of Artificial Sequence: Synthetic oligonucleotide
  Antisense strand to SEQ ID NO: 2583296
ugauagcuuaauuucuugc

SEQ ID NO: 2583298 - RNA, 19 nt, Artificial Sequence
  Description of Artificial Sequence: Synthetic oligonucleotide
  Sense strand starting at position 2787 of SEQ ID NO: 1889175
gcuaucaaacauuaaaggu

SEQ ID NO: 2583299 - RNA, 19 nt, Artificial Sequence
  Description of Artificial Sequence: Synthetic oligonucleotide
  Antisense strand to SEQ ID NO: 2583298
accuuuaauguuugauagc

SEQ ID NO: 2583300 - RNA, 19 nt, Artificial Sequence
  Description of Artificial Sequence: Synthetic oligonucleotide
  Sense strand starting at position 2802 of SEQ ID NO: 1889175
aggugaagaauguguagaa

SEQ ID NO: 2583301 - RNA, 19 nt, Artificial Sequence
  Description of Artificial Sequence: Synthetic oligonucleotide
  Antisense strand to SEQ ID NO: 2583300
uucuacacauucuucaccu

SEQ ID NO: 2583302 - RNA, 19 nt, Artificial Sequence
  Description of Artificial Sequence: Synthetic oligonucleotide
  Sense strand starting at position 2803 of SEQ ID NO: 1889175
ggugaagaauguguagaau

SEQ ID NO: 2583303 - RNA, 19 nt, Artificial Sequence
  Description of Artificial Sequence: Synthetic oligonucleotide
  Antisense strand to SEQ ID NO: 2583302
auucuacacauucuucacc

SEQ ID NO: 2583304 - RNA, 19 nt, Artificial Sequence
  Description of Artificial Sequence: Synthetic oligonucleotide
  Sense strand starting at position 2886 of SEQ ID NO: 1889175
guuucugagaaauagagcu

SEQ ID NO: 2583305 - RNA, 19 nt, Artificial Sequence
  Description of Artificial Sequence: Synthetic oligonucleotide
  Antisense strand to SEQ ID NO: 2583304
agcucuauuucucagaaac

SEQ ID NO: 2583306 - RNA, 19 nt, Artificial Sequence
  Description of Artificial Sequence: Synthetic oligonucleotide
  Sense strand starting at position 2902 of SEQ ID NO: 1889175
gcuguuacucuggacaacu

SEQ ID NO: 2583307 - RNA, 19 nt, Artificial Sequence
  Description of Artificial Sequence: Synthetic oligonucleotide
  Antisense strand to SEQ ID NO: 2583306
aguuguccagaguaacagc

SEQ ID NO: 2583308 - RNA, 19 nt, Artificial Sequence
  Description of Artificial Sequence: Synthetic oligonucleotide
  Sense strand starting at position 3473 of SEQ ID NO: 1889175
agaagacugcauuacucuu

SEQ ID NO: 2583309 - RNA, 19 nt, Artificial Sequence
  Description of Artificial Sequence: Synthetic oligonucleotide
  Antisense strand to SEQ ID NO: 2583308
aagaguaaugcagucuucu

SEQ ID NO: 2583310 - RNA, 19 nt, Artificial Sequence
  Description of Artificial Sequence: Synthetic oligonucleotide
  Sense strand starting at position 45 of SEQ ID NO: 1889176
uuauauuaucuccagugua

SEQ ID NO: 2583311 - RNA, 19 nt, Artificial Sequence
  Description of Artificial Sequence: Synthetic oligonucleotide
  Antisense strand to SEQ ID NO: 2583310
uacacuggagauaauauaa

SEQ ID NO: 2583312 - RNA, 19 nt, Artificial Sequence
  Description of Artificial Sequence: Synthetic oligonucleotide
  Sense strand starting at position 256 of SEQ ID NO: 1889176
aaguuaaaugagugcauua

SEQ ID NO: 2583313 - RNA, 19 nt, Artificial Sequence
  Description of Artificial Sequence: Synthetic oligonucleotide
  Antisense strand to SEQ ID NO: 2583312
uaaugcacucauuuaacuu

SEQ ID NO: 2583314 - RNA, 19 nt, Artificial Sequence
  Description of Artificial Sequence: Synthetic oligonucleotide
  Sense strand starting at position 258 of SEQ ID NO: 1889176
guuaaaugagugcauuacu

SEQ ID NO: 2583315 - RNA, 19 nt, Artificial Sequence
  Description of Artificial Sequence: Synthetic oligonucleotide
  Antisense strand to SEQ ID NO: 2583314
aguaaugcacucauuuaac

SEQ ID NO: 2583316 - RNA, 19 nt, Artificial Sequence
  Description of Artificial Sequence: Synthetic oligonucleotide
  Sense strand starting at position 261 of SEQ ID NO: 1889176
aaaugagugcauuacugau

SEQ ID NO: 2583317 - RNA, 19 nt, Artificial Sequence
  Description of Artificial Sequence: Synthetic oligonucleotide
  Antisense strand to SEQ ID NO: 2583316
aucaguaaugcacucauuu

SEQ ID NO: 2583318 - RNA, 19 nt, Artificial Sequence
  Description of Artificial Sequence: Synthetic oligonucleotide
  Sense strand starting at position 464 of SEQ ID NO: 1889176
uuugguaacaguuauggua

SEQ ID NO: 2583319 - RNA, 19 nt, Artificial Sequence
  Description of Artificial Sequence: Synthetic oligonucleotide
  Antisense strand to SEQ ID NO: 2583318
uaccauaacuguuaccaaa

SEQ ID NO: 2583320 - RNA, 19 nt, Artificial Sequence
  Description of Artificial Sequence: Synthetic oligonucleotide
  Sense strand starting at position 580 of SEQ ID NO: 1889176
agugaaauuugccaggaaa

SEQ ID NO: 2583321 - RNA, 19 nt, Artificial Sequence
  Description of Artificial Sequence: Synthetic oligonucleotide
  Antisense strand to SEQ ID NO: 2583320
uuuccuggcaaauuucacu

SEQ ID NO: 2583322 - RNA, 19 nt, Artificial Sequence
  Description of Artificial Sequence: Synthetic oligonucleotide
  Sense strand starting at position 649 of SEQ ID NO: 1889176
guugaucucauauagguag

SEQ ID NO: 2583323 - RNA, 19 nt, Artificial Sequence
  Description of Artificial Sequence: Synthetic oligonucleotide
  Antisense strand to SEQ ID NO: 2583322
cuaccuauaugagaucaac

SEQ ID NO: 2583324 - RNA, 19 nt, Artificial Sequence
  Description of Artificial Sequence: Synthetic oligonucleotide
  Sense strand starting at position 681 of SEQ ID NO: 1889176
agauuauuauaggcuauga

SEQ ID NO: 2583325 - RNA, 19 nt, Artificial Sequence
  Description of Artificial Sequence: Synthetic oligonucleotide
  Antisense strand to SEQ ID NO: 2583324
ucauagccuauaauaaucu

SEQ ID NO: 2583326 - RNA, 19 nt, Artificial Sequence
  Description of Artificial Sequence: Synthetic oligonucleotide
  Sense strand starting at position 710 of SEQ ID NO: 1889176
gcaaauaaaugaguuaguu

SEQ ID NO: 2583327 - RNA, 19 nt, Artificial Sequence
  Description of Artificial Sequence: Synthetic oligonucleotide
  Antisense strand to SEQ ID NO: 2583326
aacuaacucauuuauuugc

SEQ ID NO: 2583328 - RNA, 19 nt, Artificial Sequence
  Description of Artificial Sequence: Synthetic oligonucleotide
  Sense strand starting at position 785 of SEQ ID NO: 1889176
agguuauagguaugaauaa

SEQ ID NO: 2583329 - RNA, 19 nt, Artificial Sequence
  Description of Artificial Sequence: Synthetic oligonucleotide
  Antisense strand to SEQ ID NO: 2583328
uuauucauaccuauaaccu

SEQ ID NO: 2583330 - RNA, 19 nt, Artificial Sequence
  Description of Artificial Sequence: Synthetic oligonucleotide
  Sense strand starting at position 869 of SEQ ID NO: 1889176
auaugucggaaaugacuaa

SEQ ID NO: 2583331 - RNA, 19 nt, Artificial Sequence
  Description of Artificial Sequence: Synthetic oligonucleotide
  Antisense strand to SEQ ID NO: 2583330
uuagucauuuccgacauau

SEQ ID NO: 2583332 - RNA, 19 nt, Artificial Sequence
  Description of Artificial Sequence: Synthetic oligonucleotide
  Sense strand starting at position 1088 of SEQ ID NO: 1889176
gggacuuugugauccaaau

SEQ ID NO: 2583333 - RNA, 19 nt, Artificial Sequence
  Description of Artificial Sequence: Synthetic oligonucleotide
  Antisense strand to SEQ ID NO: 2583332
auuuggaucacaaaguccc

SEQ ID NO: 2583334 - RNA, 19 nt, Artificial Sequence
  Description of Artificial Sequence: Synthetic oligonucleotide
  Sense strand starting at position 1281 of SEQ ID NO: 1889176
ugagacagcuucuuugacu

SEQ ID NO: 2583335 - RNA, 19 nt, Artificial Sequence
  Description of Artificial Sequence: Synthetic oligonucleotide
  Antisense strand to SEQ ID NO: 2583334
agucaaagaagcugucuca

SEQ ID NO: 2583336 - RNA, 19 nt, Artificial Sequence
  Description of Artificial Sequence: Synthetic oligonucleotide
  Sense strand starting at position 1282 of SEQ ID NO: 1889176
gagacagcuucuuugacug

SEQ ID NO: 2583337 - RNA, 19 nt, Artificial Sequence
  Description of Artificial Sequence: Synthetic oligonucleotide
  Antisense strand to SEQ ID NO: 2583336
cagucaaagaagcugucuc

SEQ ID NO: 2583338 - RNA, 19 nt, Artificial Sequence
  Description of Artificial Sequence: Synthetic oligonucleotide
  Sense strand starting at position 1337 of SEQ ID NO: 1889176
uaaaguguugggcaaauua

SEQ ID NO: 2583339 - RNA, 19 nt, Artificial Sequence
  Description of Artificial Sequence: Synthetic oligonucleotide
  Antisense strand to SEQ ID NO: 2583338
uaauuugcccaacacuuua

SEQ ID NO: 2583340 - RNA, 19 nt, Artificial Sequence
  Description of Artificial Sequence: Synthetic oligonucleotide
  Sense strand starting at position 1435 of SEQ ID NO: 1889176
agggaagugcaaugagaug

SEQ ID NO: 2583341 - RNA, 19 nt, Artificial Sequence
  Description of Artificial Sequence: Synthetic oligonucleotide
  Antisense strand to SEQ ID NO: 2583340
caucucauugcacuucccu

SEQ ID NO: 2583342 - RNA, 19 nt, Artificial Sequence
  Description of Artificial Sequence: Synthetic oligonucleotide
  Sense strand starting at position 1440 of SEQ ID NO: 1889176
agugcaaugagaugaugau

SEQ ID NO: 2583343 - RNA, 19 nt, Artificial Sequence
  Description of Artificial Sequence: Synthetic oligonucleotide
  Antisense strand to SEQ ID NO: 2583342
aucaucaucucauugcacu

SEQ ID NO: 2583344 - RNA, 19 nt, Artificial Sequence
  Description of Artificial Sequence: Synthetic oligonucleotide
  Sense strand starting at position 1580 of SEQ ID NO: 1889176
accugcuuaguugaugaau

SEQ ID NO: 2583345 - RNA, 19 nt, Artificial Sequence
  Description of Artificial Sequence: Synthetic oligonucleotide
  Antisense strand to SEQ ID NO: 2583344
auucaucaacuaagcaggu

SEQ ID NO: 2583346 - RNA, 19 nt, Artificial Sequence
  Description of Artificial Sequence: Synthetic oligonucleotide
  Sense strand starting at position 1678 of SEQ ID NO: 1889176
augaguaaauuagcucaau

SEQ ID NO: 2583347 - RNA, 19 nt, Artificial Sequence
  Description of Artificial Sequence: Synthetic oligonucleotide
  Antisense strand to SEQ ID NO: 2583346
auugagcuaauuuacucau

SEQ ID NO: 2583348 - RNA, 19 nt, Artificial Sequence
  Description of Artificial Sequence: Synthetic oligonucleotide
  Sense strand starting at position 1679 of SEQ ID NO: 1889176
ugaguaaauuagcucaaug

SEQ ID NO: 2583349 - RNA, 19 nt, Artificial Sequence
  Description of Artificial Sequence: Synthetic oligonucleotide
  Antisense strand to SEQ ID NO: 2583348
cauugagcuaauuuacuca

SEQ ID NO: 2583350 - RNA, 19 nt, Artificial Sequence
  Description of Artificial Sequence: Synthetic oligonucleotide
  Sense strand starting at position 1681 of SEQ ID NO: 1889176
aguaaauuagcucaaugau

SEQ ID NO: 2583351 - RNA, 19 nt, Artificial Sequence
  Description of Artificial Sequence: Synthetic oligonucleotide
  Antisense strand to SEQ ID NO: 2583350
aucauugagcuaauuuacu

SEQ ID NO: 2583352 - RNA, 19 nt, Artificial Sequence
  Description of Artificial Sequence: Synthetic oligonucleotide
  Sense strand starting at position 1751 of SEQ ID NO: 1889176
augagucguaaacaguaau

SEQ ID NO: 2583353 - RNA, 19 nt, Artificial Sequence
  Description of Artificial Sequence: Synthetic oligonucleotide
  Antisense strand to SEQ ID NO: 2583352
auuacuguuuacgacucau

SEQ ID NO: 2583354 - RNA, 19 nt, Artificial Sequence
  Description of Artificial Sequence: Synthetic oligonucleotide
  Sense strand starting at position 1811 of SEQ ID NO: 1889176
aacagaugccaguauguga

SEQ ID NO: 2583355 - RNA, 19 nt, Artificial Sequence
  Description of Artificial Sequence: Synthetic oligonucleotide
  Antisense strand to SEQ ID NO: 2583354
ucacauacuggcaucuguu

SEQ ID NO: 2583356 - RNA, 19 nt, Artificial Sequence
  Description of Artificial Sequence: Synthetic oligonucleotide
  Sense strand starting at position 1926 of SEQ ID NO: 1889176
gaagaaucuucugcaggau

SEQ ID NO: 2583357 - RNA, 19 nt, Artificial Sequence
  Description of Artificial Sequence: Synthetic oligonucleotide
  Antisense strand to SEQ ID NO: 2583356
auccugcagaagauucuuc

SEQ ID NO: 2583358 - RNA, 19 nt, Artificial Sequence
  Description of Artificial Sequence: Synthetic oligonucleotide
  Sense strand starting at position 1929 of SEQ ID NO: 1889176
gaaucuucugcaggaugau

SEQ ID NO: 2583359 - RNA, 19 nt, Artificial Sequence
  Description of Artificial Sequence: Synthetic oligonucleotide
  Antisense strand to SEQ ID NO: 2583358
aucauccugcagaagauuc

SEQ ID NO: 2583360 - RNA, 19 nt, Artificial Sequence
  Description of Artificial Sequence: Synthetic oligonucleotide
  Sense strand starting at position 1941 of SEQ ID NO: 1889176
ggaugauugggaggucauu

SEQ ID NO: 2583361 - RNA, 19 nt, Artificial Sequence
  Description of Artificial Sequence: Synthetic oligonucleotide
  Antisense strand to SEQ ID NO: 2583360
aaugaccucccaaucaucc

SEQ ID NO: 2583362 - RNA, 19 nt, Artificial Sequence
  Description of Artificial Sequence: Synthetic oligonucleotide
  Sense strand starting at position 2486 of SEQ ID NO: 1889176
cuaggagacuuacugcuuu

SEQ ID NO: 2583363 - RNA, 19 nt, Artificial Sequence
  Description of Artificial Sequence: Synthetic oligonucleotide
  Antisense strand to SEQ ID NO: 2583362
aaagcaguaagucuccuag

SEQ ID NO: 2583364 - RNA, 19 nt, Artificial Sequence
  Description of Artificial Sequence: Synthetic oligonucleotide
  Sense strand starting at position 2535 of SEQ ID NO: 1889176
gucagaaaucuuggcacaa

SEQ ID NO: 2583365 - RNA, 19 nt, Artificial Sequence
  Description of Artificial Sequence: Synthetic oligonucleotide
  Antisense strand to SEQ ID NO: 2583364
uugugccaagauuucugac

SEQ ID NO: 2583366 - RNA, 19 nt, Artificial Sequence
  Description of Artificial Sequence: Synthetic oligonucleotide
  Sense strand starting at position 2536 of SEQ ID NO: 1889176
ucagaaaucuuggcacaau

SEQ ID NO: 2583367 - RNA, 19 nt, Artificial Sequence
  Description of Artificial Sequence: Synthetic oligonucleotide
  Antisense strand to SEQ ID NO: 2583366
auugugccaagauuucuga

SEQ ID NO: 2583368 - RNA, 19 nt, Artificial Sequence
  Description of Artificial Sequence: Synthetic oligonucleotide
  Sense strand starting at position 2539 of SEQ ID NO: 1889176
gaaaucuuggcacaauggu

SEQ ID NO: 2583369 - RNA, 19 nt, Artificial Sequence
  Description of Artificial Sequence: Synthetic oligonucleotide
  Antisense strand to SEQ ID NO: 2583368
accauugugccaagauuuc

SEQ ID NO: 2583370 - RNA, 19 nt, Artificial Sequence
  Description of Artificial Sequence: Synthetic oligonucleotide
  Sense strand starting at position 2595 of SEQ ID NO: 1889176
acuggaauuaggugaagca

SEQ ID NO: 2583371 - RNA, 19 nt, Artificial Sequence
  Description of Artificial Sequence: Synthetic oligonucleotide
  Antisense strand to SEQ ID NO: 2583370
ugcuucaccuaauuccagu

SEQ ID NO: 2583372 - RNA, 19 nt, Artificial Sequence
  Description of Artificial Sequence: Synthetic oligonucleotide
  Sense strand starting at position 2618 of SEQ ID NO: 1889176
uuagaagcaucccuuagua

SEQ ID NO: 2583373 - RNA, 19 nt, Artificial Sequence
  Description of Artificial Sequence: Synthetic oligonucleotide
  Antisense strand to SEQ ID NO: 2583372
uacuaagggaugcuucuaa

SEQ ID NO: 2583374 - RNA, 19 nt, Artificial Sequence
  Description of Artificial Sequence: Synthetic oligonucleotide
  Sense strand starting at position 2620 of SEQ ID NO: 1889176
agaagcaucccuuaguaaa

SEQ ID NO: 2583375 - RNA, 19 nt, Artificial Sequence
  Description of Artificial Sequence: Synthetic oligonucleotide
  Antisense strand to SEQ ID NO: 2583374
uuuacuaagggaugcuucu

SEQ ID NO: 2583376 - RNA, 19 nt, Artificial Sequence
  Description of Artificial Sequence: Synthetic oligonucleotide
  Sense strand starting at position 2774 of SEQ ID NO: 1889176
gcaagaaauuaagcuauca

SEQ ID NO: 2583377 - RNA, 19 nt, Artificial Sequence
  Description of Artificial Sequence: Synthetic oligonucleotide
  Antisense strand to SEQ ID NO: 2583376
ugauagcuuaauuucuugc

SEQ ID NO: 2583378 - RNA, 19 nt, Artificial Sequence
  Description of Artificial Sequence: Synthetic oligonucleotide
  Sense strand starting at position 2786 of SEQ ID NO: 1889176
gcuaucaaacauuaaaggu

SEQ ID NO: 2583379 - RNA, 19 nt, Artificial Sequence
  Description of Artificial Sequence: Synthetic oligonucleotide
  Antisense strand to SEQ ID NO: 2583378
accuuuaauguuugauagc

SEQ ID NO: 2583380 - RNA, 19 nt, Artificial Sequence
  Description of Artificial Sequence: Synthetic oligonucleotide
  Sense strand starting at position 2801 of SEQ ID NO: 1889176
aggugaagaauguguagaa

SEQ ID NO: 2583381 - RNA, 19 nt, Artificial Sequence
  Description of Artificial Sequence: Synthetic oligonucleotide
  Antisense strand to SEQ ID NO: 2583380
uucuacacauucuucaccu

SEQ ID NO: 2583382 - RNA, 19 nt, Artificial Sequence
  Description of Artificial Sequence: Synthetic oligonucleotide
  Sense strand starting at position 2802 of SEQ ID NO: 1889176
ggugaagaauguguagaau

SEQ ID NO: 2583383 - RNA, 19 nt, Artificial Sequence
  Description of Artificial Sequence: Synthetic oligonucleotide
  Antisense strand to SEQ ID NO: 2583382
auucuacacauucuucacc

SEQ ID NO: 2583384 - RNA, 19 nt, Artificial Sequence
  Description of Artificial Sequence: Synthetic oligonucleotide
  Sense strand starting at position 2881 of SEQ ID NO: 1889176
uaagguuucugagcaauag

SEQ ID NO: 2583385 - RNA, 19 nt, Artificial Sequence
  Description of Artificial Sequence: Synthetic oligonucleotide
  Antisense strand to SEQ ID NO: 2583384
cuauugcucagaaaccuua

SEQ ID NO: 2583386 - RNA, 19 nt, Artificial Sequence
  Description of Artificial Sequence: Synthetic oligonucleotide
  Sense strand starting at position 2901 of SEQ ID NO: 1889176
gcuguuacucuggacaacu

SEQ ID NO: 2583387 - RNA, 19 nt, Artificial Sequence
  Description of Artificial Sequence: Synthetic oligonucleotide
  Antisense strand to SEQ ID NO: 2583386
aguuguccagaguaacagc

SEQ ID NO: 2583388 - RNA, 19 nt, Artificial Sequence
  Description of Artificial Sequence: Synthetic oligonucleotide
  Sense strand starting at position 3472 of SEQ ID NO: 1889176
agaagacugcauuacucuu

SEQ ID NO: 2583389 - RNA, 19 nt, Artificial Sequence
  Description of Artificial Sequence: Synthetic oligonucleotide
  Antisense strand to SEQ ID NO: 2583388
aagaguaaugcagucuucu

SEQ ID NO: 2583390 - RNA, 19 nt, Artificial Sequence
  Description of Artificial Sequence: Synthetic oligonucleotide
  Sense strand starting at position 46 of SEQ ID NO: 1889177
uuauauuaucuccagugua

SEQ ID NO: 2583391 - RNA, 19 nt, Artificial Sequence
  Description of Artificial Sequence: Synthetic oligonucleotide
  Antisense strand to SEQ ID NO: 2583390
uacacuggagauaauauaa

SEQ ID NO: 2583392 - RNA, 19 nt, Artificial Sequence
  Description of Artificial Sequence: Synthetic oligonucleotide
  Sense strand starting at position 56 of SEQ ID NO: 1889177
uccaguguagguuauuauu

SEQ ID NO: 2583393 - RNA, 19 nt, Artificial Sequence
  Description of Artificial Sequence: Synthetic oligonucleotide
  Antisense strand to SEQ ID NO: 2583392
aauaauaaccuacacugga

SEQ ID NO: 2583394 - RNA, 19 nt, Artificial Sequence
  Description of Artificial Sequence: Synthetic oligonucleotide
  Sense strand starting at position 259 of SEQ ID NO: 1889177
guuaaaugagugcauuacu

SEQ ID NO: 2583395 - RNA, 19 nt, Artificial Sequence
  Description of Artificial Sequence: Synthetic oligonucleotide
  Antisense strand to SEQ ID NO: 2583394
aguaaugcacucauuuaac

SEQ ID NO: 2583396 - RNA, 19 nt, Artificial Sequence
  Description of Artificial Sequence: Synthetic oligonucleotide
  Sense strand starting at position 262 of SEQ ID NO: 1889177
aaaugagugcauuacugau

SEQ ID NO: 2583397 - RNA, 19 nt, Artificial Sequence
  Description of Artificial Sequence: Synthetic oligonucleotide
  Antisense strand to SEQ ID NO: 2583396
aucaguaaugcacucauuu

SEQ ID NO: 2583398 - RNA, 19 nt, Artificial Sequence
  Description of Artificial Sequence: Synthetic oligonucleotide
  Sense strand starting at position 465 of SEQ ID NO: 1889177
uuugguaacaguuauggua

SEQ ID NO: 2583399 - RNA, 19 nt, Artificial Sequence
  Description of Artificial Sequence: Synthetic oligonucleotide
  Antisense strand to SEQ ID NO: 2583398
uaccauaacuguuaccaaa

SEQ ID NO: 2583400 - RNA, 19 nt, Artificial Sequence
  Description of Artificial Sequence: Synthetic oligonucleotide
  Sense strand starting at position 581 of SEQ ID NO: 1889177
agugaaauuugccaggaaa

SEQ ID NO: 2583401 - RNA, 19 nt, Artificial Sequence
  Description of Artificial Sequence: Synthetic oligonucleotide
  Antisense strand to SEQ ID NO: 2583400
uuuccuggcaaauuucacu

SEQ ID NO: 2583402 - RNA, 19 nt, Artificial Sequence
  Description of Artificial Sequence: Synthetic oligonucleotide
  Sense strand starting at position 650 of SEQ ID NO: 1889177
guugaucucauauagguag

SEQ ID NO: 2583403 - RNA, 19 nt, Artificial Sequence
  Description of Artificial Sequence: Synthetic oligonucleotide
  Antisense strand to SEQ ID NO: 2583402
cuaccuauaugagaucaac

SEQ ID NO: 2583404 - RNA, 19 nt, Artificial Sequence
  Description of Artificial Sequence: Synthetic oligonucleotide
  Sense strand starting at position 669 of SEQ ID NO: 1889177
agaauagaaugacagauua

SEQ ID NO: 2583405 - RNA, 19 nt, Artificial Sequence
  Description of Artificial Sequence: Synthetic oligonucleotide
  Antisense strand to SEQ ID NO: 2583404
uaaucugucauucuauucu

SEQ ID NO: 2583406 - RNA, 19 nt, Artificial Sequence
  Description of Artificial Sequence: Synthetic oligonucleotide
  Sense strand starting at position 682 of SEQ ID NO: 1889177
agauuauuauaggcuauga

SEQ ID NO: 2583407 - RNA, 19 nt, Artificial Sequence
  Description of Artificial Sequence: Synthetic oligonucleotide
  Antisense strand to SEQ ID NO: 2583406
ucauagccuauaauaaucu

SEQ ID NO: 2583408 - RNA, 19 nt, Artificial Sequence
  Description of Artificial Sequence: Synthetic oligonucleotide
  Sense strand starting at position 711 of SEQ ID NO: 1889177
gcaaauaaaugaguuaguu

SEQ ID NO: 2583409 - RNA, 19 nt, Artificial Sequence
  Description of Artificial Sequence: Synthetic oligonucleotide
  Antisense strand to SEQ ID NO: 2583408
aacuaacucauuuauuugc

SEQ ID NO: 2583410 - RNA, 19 nt, Artificial Sequence
  Description of Artificial Sequence: Synthetic oligonucleotide
  Sense strand starting at position 786 of SEQ ID NO: 1889177
agguuauagguaugaauaa

SEQ ID NO: 2583411 - RNA, 19 nt, Artificial Sequence
  Description of Artificial Sequence: Synthetic oligonucleotide
  Antisense strand to SEQ ID NO: 2583410
uuauucauaccuauaaccu

SEQ ID NO: 2583412 - RNA, 19 nt, Artificial Sequence
  Description of Artificial Sequence: Synthetic oligonucleotide
  Sense strand starting at position 870 of SEQ ID NO: 1889177
auaugucggaaaugacuaa

SEQ ID NO: 2583413 - RNA, 19 nt, Artificial Sequence
  Description of Artificial Sequence: Synthetic oligonucleotide
  Antisense strand to SEQ ID NO: 2583412
uuagucauuuccgacauau

SEQ ID NO: 2583414 - RNA, 19 nt, Artificial Sequence
  Description of Artificial Sequence: Synthetic oligonucleotide
  Sense strand starting at position 1003 of SEQ ID NO: 1889177
augauaaauaguggucugu

SEQ ID NO: 2583415 - RNA, 19 nt, Artificial Sequence
  Description of Artificial Sequence: Synthetic oligonucleotide
  Antisense strand to SEQ ID NO: 2583414
acagaccacuauuuaucau

SEQ ID NO: 2583416 - RNA, 19 nt, Artificial Sequence
  Description of Artificial Sequence: Synthetic oligonucleotide
  Sense strand starting at position 1089 of SEQ ID NO: 1889177
gggacuuugugauccaaau

SEQ ID NO: 2583417 - RNA, 19 nt, Artificial Sequence
  Description of Artificial Sequence: Synthetic oligonucleotide
  Antisense strand to SEQ ID NO: 2583416
auuuggaucacaaaguccc

SEQ ID NO: 2583418 - RNA, 19 nt, Artificial Sequence
  Description of Artificial Sequence: Synthetic oligonucleotide
  Sense strand starting at position 1282 of SEQ ID NO: 1889177
ugagacagcuucuuugacu

SEQ ID NO: 2583419 - RNA, 19 nt, Artificial Sequence
  Description of Artificial Sequence: Synthetic oligonucleotide
  Antisense strand to SEQ ID NO: 2583418
agucaaagaagcugucuca

SEQ ID NO: 2583420 - RNA, 19 nt, Artificial Sequence
  Description of Artificial Sequence: Synthetic oligonucleotide
  Sense strand starting at position 1283 of SEQ ID NO: 1889177
gagacagcuucuuugacug

SEQ ID NO: 2583421 - RNA, 19 nt, Artificial Sequence
  Description of Artificial Sequence: Synthetic oligonucleotide
  Antisense strand to SEQ ID NO: 2583420
cagucaaagaagcugucuc

SEQ ID NO: 2583422 - RNA, 19 nt, Artificial Sequence
  Description of Artificial Sequence: Synthetic oligonucleotide
  Sense strand starting at position 1338 of SEQ ID NO: 1889177
uaaaguguugggcaaauua

SEQ ID NO: 2583423 - RNA, 19 nt, Artificial Sequence
  Description of Artificial Sequence: Synthetic oligonucleotide
  Antisense strand to SEQ ID NO: 2583422
uaauuugcccaacacuuua

SEQ ID NO: 2583424 - RNA, 19 nt, Artificial Sequence
  Description of Artificial Sequence: Synthetic oligonucleotide
  Sense strand starting at position 1436 of SEQ ID NO: 1889177
agggaagugcaaugagaug

SEQ ID NO: 2583425 - RNA, 19 nt, Artificial Sequence
  Description of Artificial Sequence: Synthetic oligonucleotide
  Antisense strand to SEQ ID NO: 2583424
caucucauugcacuucccu

SEQ ID NO: 2583426 - RNA, 19 nt, Artificial Sequence
  Description of Artificial Sequence: Synthetic oligonucleotide
  Sense strand starting at position 1441 of SEQ ID NO: 1889177
agugcaaugagaugaugau

SEQ ID NO: 2583427 - RNA, 19 nt, Artificial Sequence
  Description of Artificial Sequence: Synthetic oligonucleotide
  Antisense strand to SEQ ID NO: 2583426
aucaucaucucauugcacu

SEQ ID NO: 2583428 - RNA, 19 nt, Artificial Sequence
  Description of Artificial Sequence: Synthetic oligonucleotide
  Sense strand starting at position 1581 of SEQ ID NO: 1889177
accugcuuaguugaugaau

SEQ ID NO: 2583429 - RNA, 19 nt, Artificial Sequence
  Description of Artificial Sequence: Synthetic oligonucleotide
  Antisense strand to SEQ ID NO: 2583428
auucaucaacuaagcaggu

SEQ ID NO: 2583430 - RNA, 19 nt, Artificial Sequence
  Description of Artificial Sequence: Synthetic oligonucleotide
  Sense strand starting at position 1679 of SEQ ID NO: 1889177
augaguaaauuagcucaau

SEQ ID NO: 2583431 - RNA, 19 nt, Artificial Sequence
  Description of Artificial Sequence: Synthetic oligonucleotide
  Antisense strand to SEQ ID NO: 2583430
auugagcuaauuuacucau

SEQ ID NO: 2583432 - RNA, 19 nt, Artificial Sequence
  Description of Artificial Sequence: Synthetic oligonucleotide
  Sense strand starting at position 1680 of SEQ ID NO: 1889177
ugaguaaauuagcucaaug

SEQ ID NO: 2583433 - RNA, 19 nt, Artificial Sequence
  Description of Artificial Sequence: Synthetic oligonucleotide
  Antisense strand to SEQ ID NO: 2583432
cauugagcuaauuuacuca

SEQ ID NO: 2583434 - RNA, 19 nt, Artificial Sequence
  Description of Artificial Sequence: Synthetic oligonucleotide
  Sense strand starting at position 1682 of SEQ ID NO: 1889177
aguaaauuagcucaaugau

SEQ ID NO: 2583435 - RNA, 19 nt, Artificial Sequence
  Description of Artificial Sequence: Synthetic oligonucleotide
  Antisense strand to SEQ ID NO: 2583434
aucauugagcuaauuuacu

SEQ ID NO: 2583436 - RNA, 19 nt, Artificial Sequence
  Description of Artificial Sequence: Synthetic oligonucleotide
  Sense strand starting at position 1752 of SEQ ID NO: 1889177
augagucguaaacaguaau

SEQ ID NO: 2583437 - RNA, 19 nt, Artificial Sequence
  Description of Artificial Sequence: Synthetic oligonucleotide
  Antisense strand to SEQ ID NO: 2583436
auuacuguuuacgacucau

SEQ ID NO: 2583438 - RNA, 19 nt, Artificial Sequence
  Description of Artificial Sequence: Synthetic oligonucleotide
  Sense strand starting at position 1812 of SEQ ID NO: 1889177
aacagaugccaguauguga

SEQ ID NO: 2583439 - RNA, 19 nt, Artificial Sequence
  Description of Artificial Sequence: Synthetic oligonucleotide
  Antisense strand to SEQ ID NO: 2583438
ucacauacuggcaucuguu

SEQ ID NO: 2583440 - RNA, 19 nt, Artificial Sequence
  Description of Artificial Sequence: Synthetic oligonucleotide
  Sense strand starting at position 2012 of SEQ ID NO: 1889177
gcagcaguaaugcagaaau

SEQ ID NO: 2583441 - RNA, 19 nt, Artificial Sequence
  Description of Artificial Sequence: Synthetic oligonucleotide
  Antisense strand to SEQ ID NO: 2583440
auuucugcauuacugcugc

SEQ ID NO: 2583442 - RNA, 19 nt, Artificial Sequence
  Description of Artificial Sequence: Synthetic oligonucleotide
  Sense strand starting at position 2487 of SEQ ID NO: 1889177
cuaggagacuuacugcuuu

SEQ ID NO: 2583443 - RNA, 19 nt, Artificial Sequence
  Description of Artificial Sequence: Synthetic oligonucleotide
  Antisense strand to SEQ ID NO: 2583442
aaagcaguaagucuccuag

SEQ ID NO: 2583444 - RNA, 19 nt, Artificial Sequence
  Description of Artificial Sequence: Synthetic oligonucleotide
  Sense strand starting at position 2536 of SEQ ID NO: 1889177
gucagaaaucuuggcacaa

SEQ ID NO: 2583445 - RNA, 19 nt, Artificial Sequence
  Description of Artificial Sequence: Synthetic oligonucleotide
  Antisense strand to SEQ ID NO: 2583444
uugugccaagauuucugac

SEQ ID NO: 2583446 - RNA, 19 nt, Artificial Sequence
  Description of Artificial Sequence: Synthetic oligonucleotide
  Sense strand starting at position 2537 of SEQ ID NO: 1889177
ucagaaaucuuggcacaau

SEQ ID NO: 2583447 - RNA, 19 nt, Artificial Sequence
  Description of Artificial Sequence: Synthetic oligonucleotide
  Antisense strand to SEQ ID NO: 2583446
auugugccaagauuucuga

SEQ ID NO: 2583448 - RNA, 19 nt, Artificial Sequence
  Description of Artificial Sequence: Synthetic oligonucleotide
  Sense strand starting at position 2540 of SEQ ID NO: 1889177
gaaaucuuggcacaauggu

SEQ ID NO: 2583449 - RNA, 19 nt, Artificial Sequence
  Description of Artificial Sequence: Synthetic oligonucleotide
  Antisense strand to SEQ ID NO: 2583448
accauugugccaagauuuc

SEQ ID NO: 2583450 - RNA, 19 nt, Artificial Sequence
  Description of Artificial Sequence: Synthetic oligonucleotide
  Sense strand starting at position 2596 of SEQ ID NO: 1889177
acuggaauuaggugaagca

SEQ ID NO: 2583451 - RNA, 19 nt, Artificial Sequence
  Description of Artificial Sequence: Synthetic oligonucleotide
  Antisense strand to SEQ ID NO: 2583450
ugcuucaccuaauuccagu

SEQ ID NO: 2583452 - RNA, 19 nt, Artificial Sequence
  Description of Artificial Sequence: Synthetic oligonucleotide
  Sense strand starting at position 2619 of SEQ ID NO: 1889177
uuagaagcaucccuuagua

SEQ ID NO: 2583453 - RNA, 19 nt, Artificial Sequence
  Description of Artificial Sequence: Synthetic oligonucleotide
  Antisense strand to SEQ ID NO: 2583452
uacuaagggaugcuucuaa

SEQ ID NO: 2583454 - RNA, 19 nt, Artificial Sequence
  Description of Artificial Sequence: Synthetic oligonucleotide
  Sense strand starting at position 2621 of SEQ ID NO: 1889177
agaagcaucccuuaguaaa

SEQ ID NO: 2583455 - RNA, 19 nt, Artificial Sequence
  Description of Artificial Sequence: Synthetic oligonucleotide
  Antisense strand to SEQ ID NO: 2583454
uuuacuaagggaugcuucu

SEQ ID NO: 2583456 - RNA, 19 nt, Artificial Sequence
  Description of Artificial Sequence: Synthetic oligonucleotide
  Sense strand starting at position 2775 of SEQ ID NO: 1889177
gcaagaaauuaagcuauca

SEQ ID NO: 2583457 - RNA, 19 nt, Artificial Sequence
  Description of Artificial Sequence: Synthetic oligonucleotide
  Antisense strand to SEQ ID NO: 2583456
ugauagcuuaauuucuugc

SEQ ID NO: 2583458 - RNA, 19 nt, Artificial Sequence
  Description of Artificial Sequence: Synthetic oligonucleotide
  Sense strand starting at position 2787 of SEQ ID NO: 1889177
gcuaucaaacauuaaaggu

SEQ ID NO: 2583459 - RNA, 19 nt, Artificial Sequence
  Description of Artificial Sequence: Synthetic oligonucleotide
  Antisense strand to SEQ ID NO: 2583458
accuuuaauguuugauagc

SEQ ID NO: 2583460 - RNA, 19 nt, Artificial Sequence
  Description of Artificial Sequence: Synthetic oligonucleotide
  Sense strand starting at position 2802 of SEQ ID NO: 1889177
aggugaagaauguguagaa

SEQ ID NO: 2583461 - RNA, 19 nt, Artificial Sequence
  Description of Artificial Sequence: Synthetic oligonucleotide
  Antisense strand to SEQ ID NO: 2583460
uucuacacauucuucaccu

SEQ ID NO: 2583462 - RNA, 19 nt, Artificial Sequence
  Description of Artificial Sequence: Synthetic oligonucleotide
  Sense strand starting at position 2803 of SEQ ID NO: 1889177
ggugaagaauguguagaau

SEQ ID NO: 2583463 - RNA, 19 nt, Artificial Sequence
  Description of Artificial Sequence: Synthetic oligonucleotide
  Antisense strand to SEQ ID NO: 2583462
auucuacacauucuucacc

SEQ ID NO: 2583464 - RNA, 19 nt, Artificial Sequence
  Description of Artificial Sequence: Synthetic oligonucleotide
  Sense strand starting at position 2886 of SEQ ID NO: 1889177
guuucugagaaauagagcu

SEQ ID NO: 2583465 - RNA, 19 nt, Artificial Sequence
  Description of Artificial Sequence: Synthetic oligonucleotide
  Antisense strand to SEQ ID NO: 2583464
agcucuauuucucagaaac

SEQ ID NO: 2583466 - RNA, 19 nt, Artificial Sequence
  Description of Artificial Sequence: Synthetic oligonucleotide
  Sense strand starting at position 2902 of SEQ ID NO: 1889177
gcuguuacucuggacaacu

SEQ ID NO: 2583467 - RNA, 19 nt, Artificial Sequence
  Description of Artificial Sequence: Synthetic oligonucleotide
  Antisense strand to SEQ ID NO: 2583466
aguuguccagaguaacagc

SEQ ID NO: 2583468 - RNA, 19 nt, Artificial Sequence
  Description of Artificial Sequence: Synthetic oligonucleotide
  Sense strand starting at position 3473 of SEQ ID NO: 1889177
agaagacugcauuacucuu

SEQ ID NO: 2583469 - RNA, 19 nt, Artificial Sequence
  Description of Artificial Sequence: Synthetic oligonucleotide
  Antisense strand to SEQ ID NO: 2583468
aagaguaaugcagucuucu

SEQ ID NO: 2583470 - RNA, 19 nt, Artificial Sequence
  Description of Artificial Sequence: Synthetic oligonucleotide
  Sense strand starting at position 2299 of SEQ ID NO: 1889178
aucuuaguuaguggaggua

SEQ ID NO: 2583471 - RNA, 19 nt, Artificial Sequence
  Description of Artificial Sequence: Synthetic oligonucleotide
  Antisense strand to SEQ ID NO: 2583470
uaccuccacuaacuaagau

SEQ ID NO: 2583472 - RNA, 19 nt, Artificial Sequence
  Description of Artificial Sequence: Synthetic oligonucleotide
  Sense strand starting at position 2286 of SEQ ID NO: 1889179
ccuggagagagccauguua

SEQ ID NO: 2583473 - RNA, 19 nt, Artificial Sequence
  Description of Artificial Sequence: Synthetic oligonucleotide
  Antisense strand to SEQ ID NO: 2583472
uaacauggcucucuccagg

SEQ ID NO: 2583474 - RNA, 19 nt, Artificial Sequence
  Description of Artificial Sequence: Synthetic oligonucleotide
  Sense strand starting at position 2288 of SEQ ID NO: 1889179
uggagagagccauguuagu

SEQ ID NO: 2583475 - RNA, 19 nt, Artificial Sequence
  Description of Artificial Sequence: Synthetic oligonucleotide
  Antisense strand to SEQ ID NO: 2583474
acuaacauggcucucucca

SEQ ID NO: 2583476 - RNA, 19 nt, Artificial Sequence
  Description of Artificial Sequence: Synthetic oligonucleotide
  Sense strand starting at position 2299 of SEQ ID NO: 1889179
auguuaguuaguggaggua

SEQ ID NO: 2583477 - RNA, 19 nt, Artificial Sequence
  Description of Artificial Sequence: Synthetic oligonucleotide
  Antisense strand to SEQ ID NO: 2583476
uaccuccacuaacuaacau

SEQ ID NO: 2583478 - RNA, 19 nt, Artificial Sequence
  Description of Artificial Sequence: Synthetic oligonucleotide
  Sense strand starting at position 2301 of SEQ ID NO: 1889179
guuaguuaguggagguaga

SEQ ID NO: 2583479 - RNA, 19 nt, Artificial Sequence
  Description of Artificial Sequence: Synthetic oligonucleotide
  Antisense strand to SEQ ID NO: 2583478
ucuaccuccacuaacuaac

SEQ ID NO: 2583480 - RNA, 19 nt, Artificial Sequence
  Description of Artificial Sequence: Synthetic oligonucleotide
  Sense strand starting at position 128 of SEQ ID NO: 1889180
ugaggcgucccauauccua

SEQ ID NO: 2583481 - RNA, 19 nt, Artificial Sequence
  Description of Artificial Sequence: Synthetic oligonucleotide
  Antisense strand to SEQ ID NO: 2583480
uaggauaugggacgccuca

SEQ ID NO: 2583482 - RNA, 19 nt, Artificial Sequence
  Description of Artificial Sequence: Synthetic oligonucleotide
  Sense strand starting at position 163 of SEQ ID NO: 1889180
uuguuaagccuguuugucu

SEQ ID NO: 2583483 - RNA, 19 nt, Artificial Sequence
  Description of Artificial Sequence: Synthetic oligonucleotide
  Antisense strand to SEQ ID NO: 2583482
agacaaacaggcuuaacaa

SEQ ID NO: 2583484 - RNA, 19 nt, Artificial Sequence
  Description of Artificial Sequence: Synthetic oligonucleotide
  Sense strand starting at position 303 of SEQ ID NO: 1889180
cagaaauaguucuuacagg

SEQ ID NO: 2583485 - RNA, 19 nt, Artificial Sequence
  Description of Artificial Sequence: Synthetic oligonucleotide
  Antisense strand to SEQ ID NO: 2583484
ccuguaagaacuauuucug

SEQ ID NO: 2583486 - RNA, 19 nt, Artificial Sequence
  Description of Artificial Sequence: Synthetic oligonucleotide
  Sense strand starting at position 471 of SEQ ID NO: 1889180
gggcgacaugacuaagagu

SEQ ID NO: 2583487 - RNA, 19 nt, Artificial Sequence
  Description of Artificial Sequence: Synthetic oligonucleotide
  Antisense strand to SEQ ID NO: 2583486
acucuuagucaugucgccc

SEQ ID NO: 2583488 - RNA, 19 nt, Artificial Sequence
  Description of Artificial Sequence: Synthetic oligonucleotide
  Sense strand starting at position 725 of SEQ ID NO: 1889180
ccugcuauuuagcccuaga

SEQ ID NO: 2583489 - RNA, 19 nt, Artificial Sequence
  Description of Artificial Sequence: Synthetic oligonucleotide
  Antisense strand to SEQ ID NO: 2583488
ucuagggcuaaauagcagg

SEQ ID NO: 2583490 - RNA, 19 nt, Artificial Sequence
  Description of Artificial Sequence: Synthetic oligonucleotide
  Sense strand starting at position 844 of SEQ ID NO: 1889180
uggaauugauuccuuccca

SEQ ID NO: 2583491 - RNA, 19 nt, Artificial Sequence
  Description of Artificial Sequence: Synthetic oligonucleotide
  Antisense strand to SEQ ID NO: 2583490
ugggaaggaaucaauucca

SEQ ID NO: 2583492 - RNA, 19 nt, Artificial Sequence
  Description of Artificial Sequence: Synthetic oligonucleotide
  Sense strand starting at position 845 of SEQ ID NO: 1889180
ggaauugauuccuucccau

SEQ ID NO: 2583493 - RNA, 19 nt, Artificial Sequence
  Description of Artificial Sequence: Synthetic oligonucleotide
  Antisense strand to SEQ ID NO: 2583492
augggaaggaaucaauucc

SEQ ID NO: 2583494 - RNA, 19 nt, Artificial Sequence
  Description of Artificial Sequence: Synthetic oligonucleotide
  Sense strand starting at position 1078 of SEQ ID NO: 1889180
cgcugacuucgggagugaa

SEQ ID NO: 2583495 - RNA, 19 nt, Artificial Sequence
  Description of Artificial Sequence: Synthetic oligonucleotide
  Antisense strand to SEQ ID NO: 2583494
uucacucccgaagucagcg

SEQ ID NO: 2583496 - RNA, 19 nt, Artificial Sequence
  Description of Artificial Sequence: Synthetic oligonucleotide
  Sense strand starting at position 1137 of SEQ ID NO: 1889180
ggugcauccaguguuguuu

SEQ ID NO: 2583497 - RNA, 19 nt, Artificial Sequence
  Description of Artificial Sequence: Synthetic oligonucleotide
  Antisense strand to SEQ ID NO: 2583496
aaacaacacuggaugcacc

SEQ ID NO: 2583498 - RNA, 19 nt, Artificial Sequence
  Description of Artificial Sequence: Synthetic oligonucleotide
  Sense strand starting at position 1411 of SEQ ID NO: 1889180
agugcugaucggucuguuu

SEQ ID NO: 2583499 - RNA, 19 nt, Artificial Sequence
  Description of Artificial Sequence: Synthetic oligonucleotide
  Antisense strand to SEQ ID NO: 2583498
aaacagaccgaucagcacu

SEQ ID NO: 2583500 - RNA, 19 nt, Artificial Sequence
  Description of Artificial Sequence: Synthetic oligonucleotide
  Sense strand starting at position 1537 of SEQ ID NO: 1889180
ccugauuagcucuacacag

SEQ ID NO: 2583501 - RNA, 19 nt, Artificial Sequence
  Description of Artificial Sequence: Synthetic oligonucleotide
  Antisense strand to SEQ ID NO: 2583500
cuguguagagcuaaucagg

SEQ ID NO: 2583502 - RNA, 19 nt, Artificial Sequence
  Description of Artificial Sequence: Synthetic oligonucleotide
  Sense strand starting at position 1743 of SEQ ID NO: 1889180
uucuguugagcugauaaau

SEQ ID NO: 2583503 - RNA, 19 nt, Artificial Sequence
  Description of Artificial Sequence: Synthetic oligonucleotide
  Antisense strand to SEQ ID NO: 2583502
auuuaucagcucaacagaa

SEQ ID NO: 2583504 - RNA, 19 nt, Artificial Sequence
  Description of Artificial Sequence: Synthetic oligonucleotide
  Sense strand starting at position 1754 of SEQ ID NO: 1889180
ugauaaauguugucccaug

SEQ ID NO: 2583505 - RNA, 19 nt, Artificial Sequence
  Description of Artificial Sequence: Synthetic oligonucleotide
  Antisense strand to SEQ ID NO: 2583504
caugggacaacauuuauca

SEQ ID NO: 2583506 - RNA, 19 nt, Artificial Sequence
  Description of Artificial Sequence: Synthetic oligonucleotide
  Sense strand starting at position 1755 of SEQ ID NO: 1889180
gauaaauguugucccauga

SEQ ID NO: 2583507 - RNA, 19 nt, Artificial Sequence
  Description of Artificial Sequence: Synthetic oligonucleotide
  Antisense strand to SEQ ID NO: 2583506
ucaugggacaacauuuauc

SEQ ID NO: 2583508 - RNA, 19 nt, Artificial Sequence
  Description of Artificial Sequence: Synthetic oligonucleotide
  Sense strand starting at position 1759 of SEQ ID NO: 1889180
aauguugucccaugagaau

SEQ ID NO: 2583509 - RNA, 19 nt, Artificial Sequence
  Description of Artificial Sequence: Synthetic oligonucleotide
  Antisense strand to SEQ ID NO: 2583508
auucucaugggacaacauu

SEQ ID NO: 2583510 - RNA, 19 nt, Artificial Sequence
  Description of Artificial Sequence: Synthetic oligonucleotide
  Sense strand starting at position 1831 of SEQ ID NO: 1889180
augacuuacugauuaguca

SEQ ID NO: 2583511 - RNA, 19 nt, Artificial Sequence
  Description of Artificial Sequence: Synthetic oligonucleotide
  Antisense strand to SEQ ID NO: 2583510
ugacuaaucaguaagucau

SEQ ID NO: 2583512 - RNA, 19 nt, Artificial Sequence
  Description of Artificial Sequence: Synthetic oligonucleotide
  Sense strand starting at position 1835 of SEQ ID NO: 1889180
cuuacugauuagucacuga

SEQ ID NO: 2583513 - RNA, 19 nt, Artificial Sequence
  Description of Artificial Sequence: Synthetic oligonucleotide
  Antisense strand to SEQ ID NO: 2583512
ucagugacuaaucaguaag

SEQ ID NO: 2583514 - RNA, 19 nt, Artificial Sequence
  Description of Artificial Sequence: Synthetic oligonucleotide
  Sense strand starting at position 1838 of SEQ ID NO: 1889180
acugauuagucacugacuu

SEQ ID NO: 2583515 - RNA, 19 nt, Artificial Sequence
  Description of Artificial Sequence: Synthetic oligonucleotide
  Antisense strand to SEQ ID NO: 2583514
aagucagugacuaaucagu

SEQ ID NO: 2583516 - RNA, 19 nt, Artificial Sequence
  Description of Artificial Sequence: Synthetic oligonucleotide
  Sense strand starting at position 1839 of SEQ ID NO: 1889180
cugauuagucacugacuuc

SEQ ID NO: 2583517 - RNA, 19 nt, Artificial Sequence
  Description of Artificial Sequence: Synthetic oligonucleotide
  Antisense strand to SEQ ID NO: 2583516
gaagucagugacuaaucag

SEQ ID NO: 2583518 - RNA, 19 nt, Artificial Sequence
  Description of Artificial Sequence: Synthetic oligonucleotide
  Sense strand starting at position 1995 of SEQ ID NO: 1889180
ccuggcgaugggugaauaa

SEQ ID NO: 2583519 - RNA, 19 nt, Artificial Sequence
  Description of Artificial Sequence: Synthetic oligonucleotide
  Antisense strand to SEQ ID NO: 2583518
uuauucacccaucgccagg

SEQ ID NO: 2583520 - RNA, 19 nt, Artificial Sequence
  Description of Artificial Sequence: Synthetic oligonucleotide
  Sense strand starting at position 2080 of SEQ ID NO: 1889180
cggagaguccuguaaagaa

SEQ ID NO: 2583521 - RNA, 19 nt, Artificial Sequence
  Description of Artificial Sequence: Synthetic oligonucleotide
  Antisense strand to SEQ ID NO: 2583520
uucuuuacaggacucuccg

SEQ ID NO: 2583522 - RNA, 19 nt, Artificial Sequence
  Description of Artificial Sequence: Synthetic oligonucleotide
  Sense strand starting at position 2202 of SEQ ID NO: 1889180
gagaauaguucugugaaug

SEQ ID NO: 2583523 - RNA, 19 nt, Artificial Sequence
  Description of Artificial Sequence: Synthetic oligonucleotide
  Antisense strand to SEQ ID NO: 2583522
cauucacagaacuauucuc

SEQ ID NO: 2583524 - RNA, 19 nt, Artificial Sequence
  Description of Artificial Sequence: Synthetic oligonucleotide
  Sense strand starting at position 2203 of SEQ ID NO: 1889180
agaauaguucugugaauga

SEQ ID NO: 2583525 - RNA, 19 nt, Artificial Sequence
  Description of Artificial Sequence: Synthetic oligonucleotide
  Antisense strand to SEQ ID NO: 2583524
ucauucacagaacuauucu

SEQ ID NO: 2583526 - RNA, 19 nt, Artificial Sequence
  Description of Artificial Sequence: Synthetic oligonucleotide
  Sense strand starting at position 2207 of SEQ ID NO: 1889180
uaguucugugaaugauuaa

SEQ ID NO: 2583527 - RNA, 19 nt, Artificial Sequence
  Description of Artificial Sequence: Synthetic oligonucleotide
  Antisense strand to SEQ ID NO: 2583526
uuaaucauucacagaacua

SEQ ID NO: 2583528 - RNA, 19 nt, Artificial Sequence
  Description of Artificial Sequence: Synthetic oligonucleotide
  Sense strand starting at position 2232 of SEQ ID NO: 1889180
guuaccacagucuaaagua

SEQ ID NO: 2583529 - RNA, 19 nt, Artificial Sequence
  Description of Artificial Sequence: Synthetic oligonucleotide
  Antisense strand to SEQ ID NO: 2583528
uacuuuagacugugguaac

SEQ ID NO: 2583530 - RNA, 19 nt, Artificial Sequence
  Description of Artificial Sequence: Synthetic oligonucleotide
  Sense strand starting at position 2262 of SEQ ID NO: 1889180
gggcaauuucucuggucga

SEQ ID NO: 2583531 - RNA, 19 nt, Artificial Sequence
  Description of Artificial Sequence: Synthetic oligonucleotide
  Antisense strand to SEQ ID NO: 2583530
ucgaccagagaaauugccc

SEQ ID NO: 2583532 - RNA, 19 nt, Artificial Sequence
  Description of Artificial Sequence: Synthetic oligonucleotide
  Sense strand starting at position 2276 of SEQ ID NO: 1889180
gucgaacucccuggagaga

SEQ ID NO: 2583533 - RNA, 19 nt, Artificial Sequence
  Description of Artificial Sequence: Synthetic oligonucleotide
  Antisense strand to SEQ ID NO: 2583532
ucucuccagggaguucgac

SEQ ID NO: 2583534 - RNA, 19 nt, Artificial Sequence
  Description of Artificial Sequence: Synthetic oligonucleotide
  Sense strand starting at position 2298 of SEQ ID NO: 1889180
aucuuaguuaguggaggua

SEQ ID NO: 2583535 - RNA, 19 nt, Artificial Sequence
  Description of Artificial Sequence: Synthetic oligonucleotide
  Antisense strand to SEQ ID NO: 2583534
uaccuccacuaacuaagau

SEQ ID NO: 2583536 - RNA, 19 nt, Artificial Sequence
  Description of Artificial Sequence: Synthetic oligonucleotide
  Sense strand starting at position 2691 of SEQ ID NO: 1889180
ugauuaccgucaguuuaaa

SEQ ID NO: 2583537 - RNA, 19 nt, Artificial Sequence
  Description of Artificial Sequence: Synthetic oligonucleotide
  Antisense strand to SEQ ID NO: 2583536
uuuaaacugacgguaauca

SEQ ID NO: 2583538 - RNA, 19 nt, Artificial Sequence
  Description of Artificial Sequence: Synthetic oligonucleotide
  Sense strand starting at position 2788 of SEQ ID NO: 1889180
ugcaauuguugggugaaac

SEQ ID NO: 2583539 - RNA, 19 nt, Artificial Sequence
  Description of Artificial Sequence: Synthetic oligonucleotide
  Antisense strand to SEQ ID NO: 2583538
guuucacccaacaauugca

SEQ ID NO: 2583540 - RNA, 19 nt, Artificial Sequence
  Description of Artificial Sequence: Synthetic oligonucleotide
  Sense strand starting at position 2789 of SEQ ID NO: 1889180
gcaauuguugggugaaaca

SEQ ID NO: 2583541 - RNA, 19 nt, Artificial Sequence
  Description of Artificial Sequence: Synthetic oligonucleotide
  Antisense strand to SEQ ID NO: 2583540
uguuucacccaacaauugc

SEQ ID NO: 2583542 - RNA, 19 nt, Artificial Sequence
  Description of Artificial Sequence: Synthetic oligonucleotide
  Sense strand starting at position 2971 of SEQ ID NO: 1889180
uccaauuugugucuuguuu

SEQ ID NO: 2583543 - RNA, 19 nt, Artificial Sequence
  Description of Artificial Sequence: Synthetic oligonucleotide
  Antisense strand to SEQ ID NO: 2583542
aaacaagacacaaauugga

SEQ ID NO: 2583544 - RNA, 19 nt, Artificial Sequence
  Description of Artificial Sequence: Synthetic oligonucleotide
  Sense strand starting at position 2975 of SEQ ID NO: 1889180
auuugugucuuguuugaaa

SEQ ID NO: 2583545 - RNA, 19 nt, Artificial Sequence
  Description of Artificial Sequence: Synthetic oligonucleotide
  Antisense strand to SEQ ID NO: 2583544
uuucaaacaagacacaaau

SEQ ID NO: 2583546 - RNA, 19 nt, Artificial Sequence
  Description of Artificial Sequence: Synthetic oligonucleotide
  Sense strand starting at position 3251 of SEQ ID NO: 1889180
ucaguuuauuugucuuuac

SEQ ID NO: 2583547 - RNA, 19 nt, Artificial Sequence
  Description of Artificial Sequence: Synthetic oligonucleotide
  Antisense strand to SEQ ID NO: 2583546
guaaagacaaauaaacuga

SEQ ID NO: 2583548 - RNA, 19 nt, Artificial Sequence
  Description of Artificial Sequence: Synthetic oligonucleotide
  Sense strand starting at position 3449 of SEQ ID NO: 1889180
aucuccaauccaggguaua

SEQ ID NO: 2583549 - RNA, 19 nt, Artificial Sequence
  Description of Artificial Sequence: Synthetic oligonucleotide
  Antisense strand to SEQ ID NO: 2583548
uauacccuggauuggagau

SEQ ID NO: 2583550 - RNA, 19 nt, Artificial Sequence
  Description of Artificial Sequence: Synthetic oligonucleotide
  Sense strand starting at position 3479 of SEQ ID NO: 1889180
cuagcaggauugcuaagau

SEQ ID NO: 2583551 - RNA, 19 nt, Artificial Sequence
  Description of Artificial Sequence: Synthetic oligonucleotide
  Antisense strand to SEQ ID NO: 2583550
aucuuagcaauccugcuag

SEQ ID NO: 2583552 - RNA, 19 nt, Artificial Sequence
  Description of Artificial Sequence: Synthetic oligonucleotide
  Sense strand starting at position 3615 of SEQ ID NO: 1889180
cccuuuauuugugugccaa

SEQ ID NO: 2583553 - RNA, 19 nt, Artificial Sequence
  Description of Artificial Sequence: Synthetic oligonucleotide
  Antisense strand to SEQ ID NO: 2583552
uuggcacacaaauaaaggg

SEQ ID NO: 2583554 - RNA, 19 nt, Artificial Sequence
  Description of Artificial Sequence: Synthetic oligonucleotide
  Sense strand starting at position 3616 of SEQ ID NO: 1889180
ccuuuauuugugugccaau

SEQ ID NO: 2583555 - RNA, 19 nt, Artificial Sequence
  Description of Artificial Sequence: Synthetic oligonucleotide
  Antisense strand to SEQ ID NO: 2583554
auuggcacacaaauaaagg

SEQ ID NO: 2583556 - RNA, 19 nt, Artificial Sequence
  Description of Artificial Sequence: Synthetic oligonucleotide
  Sense strand starting at position 3644 of SEQ ID NO: 1889180
acacauaauccuggguacu

SEQ ID NO: 2583557 - RNA, 19 nt, Artificial Sequence
  Description of Artificial Sequence: Synthetic oligonucleotide
  Antisense strand to SEQ ID NO: 2583556
aguacccaggauuaugugu

SEQ ID NO: 2583558 - RNA, 19 nt, Artificial Sequence
  Description of Artificial Sequence: Synthetic oligonucleotide
  Sense strand starting at position 3971 of SEQ ID NO: 1889180
ucaccaggcugguuugaaa

SEQ ID NO: 2583559 - RNA, 19 nt, Artificial Sequence
  Description of Artificial Sequence: Synthetic oligonucleotide
  Antisense strand to SEQ ID NO: 2583558
uuucaaaccagccugguga

SEQ ID NO: 2583560 - RNA, 19 nt, Artificial Sequence
  Description of Artificial Sequence: Synthetic oligonucleotide
  Sense strand starting at position 2299 of SEQ ID NO: 1889181
aucuuaguuaguggaggua

SEQ ID NO: 2583561 - RNA, 19 nt, Artificial Sequence
  Description of Artificial Sequence: Synthetic oligonucleotide
  Antisense strand to SEQ ID NO: 2583560
uaccuccacuaacuaagau

SEQ ID NO: 2583562 - RNA, 19 nt, Artificial Sequence
  Description of Artificial Sequence: Synthetic oligonucleotide
  Sense strand starting at position 2286 of SEQ ID NO: 1889182
ccuggagagagccauguua

SEQ ID NO: 2583563 - RNA, 19 nt, Artificial Sequence
  Description of Artificial Sequence: Synthetic oligonucleotide
  Antisense strand to SEQ ID NO: 2583562
uaacauggcucucuccagg

SEQ ID NO: 2583564 - RNA, 19 nt, Artificial Sequence
  Description of Artificial Sequence: Synthetic oligonucleotide
  Sense strand starting at position 2288 of SEQ ID NO: 1889182
uggagagagccauguuagu

SEQ ID NO: 2583565 - RNA, 19 nt, Artificial Sequence
  Description of Artificial Sequence: Synthetic oligonucleotide
  Antisense strand to SEQ ID NO: 2583564
acuaacauggcucucucca

SEQ ID NO: 2583566 - RNA, 19 nt, Artificial Sequence
  Description of Artificial Sequence: Synthetic oligonucleotide
  Sense strand starting at position 2299 of SEQ ID NO: 1889182
auguuaguuaguggaggua

SEQ ID NO: 2583567 - RNA, 19 nt, Artificial Sequence
  Description of Artificial Sequence: Synthetic oligonucleotide
  Antisense strand to SEQ ID NO: 2583566
uaccuccacuaacuaacau

SEQ ID NO: 2583568 - RNA, 19 nt, Artificial Sequence
  Description of Artificial Sequence: Synthetic oligonucleotide
  Sense strand starting at position 2301 of SEQ ID NO: 1889182
guuaguuaguggagguaga

SEQ ID NO: 2583569 - RNA, 19 nt, Artificial Sequence
  Description of Artificial Sequence: Synthetic oligonucleotide
  Antisense strand to SEQ ID NO: 2583568
ucuaccuccacuaacuaac

SEQ ID NO: 2583570 - RNA, 19 nt, Artificial Sequence
  Description of Artificial Sequence: Synthetic oligonucleotide
  Sense strand starting at position 128 of SEQ ID NO: 1889183
ugaggcgucccauauccua

SEQ ID NO: 2583571 - RNA, 19 nt, Artificial Sequence
  Description of Artificial Sequence: Synthetic oligonucleotide
  Antisense strand to SEQ ID NO: 2583570
uaggauaugggacgccuca

SEQ ID NO: 2583572 - RNA, 19 nt, Artificial Sequence
  Description of Artificial Sequence: Synthetic oligonucleotide
  Sense strand starting at position 163 of SEQ ID NO: 1889183
uuguuaagccuguuugucu

SEQ ID NO: 2583573 - RNA, 19 nt, Artificial Sequence
  Description of Artificial Sequence: Synthetic oligonucleotide
  Antisense strand to SEQ ID NO: 2583572
agacaaacaggcuuaacaa

SEQ ID NO: 2583574 - RNA, 19 nt, Artificial Sequence
  Description of Artificial Sequence: Synthetic oligonucleotide
  Sense strand starting at position 303 of SEQ ID NO: 1889183
cagaaauaguucuuacagg

SEQ ID NO: 2583575 - RNA, 19 nt, Artificial Sequence
  Description of Artificial Sequence: Synthetic oligonucleotide
  Antisense strand to SEQ ID NO: 2583574
ccuguaagaacuauuucug

SEQ ID NO: 2583576 - RNA, 19 nt, Artificial Sequence
  Description of Artificial Sequence: Synthetic oligonucleotide
  Sense strand starting at position 471 of SEQ ID NO: 1889183
gggcgacaugacuaagagu

SEQ ID NO: 2583577 - RNA, 19 nt, Artificial Sequence
  Description of Artificial Sequence: Synthetic oligonucleotide
  Antisense strand to SEQ ID NO: 2583576
acucuuagucaugucgccc

SEQ ID NO: 2583578 - RNA, 19 nt, Artificial Sequence
  Description of Artificial Sequence: Synthetic oligonucleotide
  Sense strand starting at position 725 of SEQ ID NO: 1889183
ccugcuauuuagcccuaga

SEQ ID NO: 2583579 - RNA, 19 nt, Artificial Sequence
  Description of Artificial Sequence: Synthetic oligonucleotide
  Antisense strand to SEQ ID NO: 2583578
ucuagggcuaaauagcagg

SEQ ID NO: 2583580 - RNA, 19 nt, Artificial Sequence
  Description of Artificial Sequence: Synthetic oligonucleotide
  Sense strand starting at position 844 of SEQ ID NO: 1889183
uggaauugauuccuuccca

SEQ ID NO: 2583581 - RNA, 19 nt, Artificial Sequence
  Description of Artificial Sequence: Synthetic oligonucleotide
  Antisense strand to SEQ ID NO: 2583580
ugggaaggaaucaauucca

SEQ ID NO: 2583582 - RNA, 19 nt, Artificial Sequence
  Description of Artificial Sequence: Synthetic oligonucleotide
  Sense strand starting at position 845 of SEQ ID NO: 1889183
ggaauugauuccuucccau

SEQ ID NO: 2583583 - RNA, 19 nt, Artificial Sequence
  Description of Artificial Sequence: Synthetic oligonucleotide
  Antisense strand to SEQ ID NO: 2583582
augggaaggaaucaauucc

SEQ ID NO: 2583584 - RNA, 19 nt, Artificial Sequence
  Description of Artificial Sequence: Synthetic oligonucleotide
  Sense strand starting at position 1078 of SEQ ID NO: 1889183
cgcugacuucgggagugaa

SEQ ID NO: 2583585 - RNA, 19 nt, Artificial Sequence
  Description of Artificial Sequence: Synthetic oligonucleotide
  Antisense strand to SEQ ID NO: 2583584
uucacucccgaagucagcg

SEQ ID NO: 2583586 - RNA, 19 nt, Artificial Sequence
  Description of Artificial Sequence: Synthetic oligonucleotide
  Sense strand starting at position 1137 of SEQ ID NO: 1889183
ggugcauccaguguuguuu

SEQ ID NO: 2583587 - RNA, 19 nt, Artificial Sequence
  Description of Artificial Sequence: Synthetic oligonucleotide
  Antisense strand to SEQ ID NO: 2583586
aaacaacacuggaugcacc

SEQ ID NO: 2583588 - RNA, 19 nt, Artificial Sequence
  Description of Artificial Sequence: Synthetic oligonucleotide
  Sense strand starting at position 1411 of SEQ ID NO: 1889183
agugcugaucggucuguuu

SEQ ID NO: 2583589 - RNA, 19 nt, Artificial Sequence
  Description of Artificial Sequence: Synthetic oligonucleotide
  Antisense strand to SEQ ID NO: 2583588
aaacagaccgaucagcacu

SEQ ID NO: 2583590 - RNA, 19 nt, Artificial Sequence
  Description of Artificial Sequence: Synthetic oligonucleotide
  Sense strand starting at position 1537 of SEQ ID NO: 1889183
ccugauuagcucuacacag

SEQ ID NO: 2583591 - RNA, 19 nt, Artificial Sequence
  Description of Artificial Sequence: Synthetic oligonucleotide
  Antisense strand to SEQ ID NO: 2583590
cuguguagagcuaaucagg

SEQ ID NO: 2583592 - RNA, 19 nt, Artificial Sequence
  Description of Artificial Sequence: Synthetic oligonucleotide
  Sense strand starting at position 1743 of SEQ ID NO: 1889183
uucuguugagcugauaaau

SEQ ID NO: 2583593 - RNA, 19 nt, Artificial Sequence
  Description of Artificial Sequence: Synthetic oligonucleotide
  Antisense strand to SEQ ID NO: 2583592
auuuaucagcucaacagaa

SEQ ID NO: 2583594 - RNA, 19 nt, Artificial Sequence
  Description of Artificial Sequence: Synthetic oligonucleotide
  Sense strand starting at position 1754 of SEQ ID NO: 1889183
ugauaaauguugucccaug

SEQ ID NO: 2583595 - RNA, 19 nt, Artificial Sequence
  Description of Artificial Sequence: Synthetic oligonucleotide
  Antisense strand to SEQ ID NO: 2583594
caugggacaacauuuauca

SEQ ID NO: 2583596 - RNA, 19 nt, Artificial Sequence
  Description of Artificial Sequence: Synthetic oligonucleotide
  Sense strand starting at position 1755 of SEQ ID NO: 1889183
gauaaauguugucccauga

SEQ ID NO: 2583597 - RNA, 19 nt, Artificial Sequence
  Description of Artificial Sequence: Synthetic oligonucleotide
  Antisense strand to SEQ ID NO: 2583596
ucaugggacaacauuuauc

SEQ ID NO: 2583598 - RNA, 19 nt, Artificial Sequence
  Description of Artificial Sequence: Synthetic oligonucleotide
  Sense strand starting at position 1759 of SEQ ID NO: 1889183
aauguugucccaugagaau

SEQ ID NO: 2583599 - RNA, 19 nt, Artificial Sequence
  Description of Artificial Sequence: Synthetic oligonucleotide
  Antisense strand to SEQ ID NO: 2583598
auucucaugggacaacauu

SEQ ID NO: 2583600 - RNA, 19 nt, Artificial Sequence
  Description of Artificial Sequence: Synthetic oligonucleotide
  Sense strand starting at position 1831 of SEQ ID NO: 1889183
augacuuacugauuaguca

SEQ ID NO: 2583601 - RNA, 19 nt, Artificial Sequence
  Description of Artificial Sequence: Synthetic oligonucleotide
  Antisense strand to SEQ ID NO: 2583600
ugacuaaucaguaagucau

SEQ ID NO: 2583602 - RNA, 19 nt, Artificial Sequence
  Description of Artificial Sequence: Synthetic oligonucleotide
  Sense strand starting at position 1835 of SEQ ID NO: 1889183
cuuacugauuagucacuga

SEQ ID NO: 2583603 - RNA, 19 nt, Artificial Sequence
  Description of Artificial Sequence: Synthetic oligonucleotide
  Antisense strand to SEQ ID NO: 2583602
ucagugacuaaucaguaag

SEQ ID NO: 2583604 - RNA, 19 nt, Artificial Sequence
  Description of Artificial Sequence: Synthetic oligonucleotide
  Sense strand starting at position 1838 of SEQ ID NO: 1889183
acugauuagucacugacuu

SEQ ID NO: 2583605 - RNA, 19 nt, Artificial Sequence
  Description of Artificial Sequence: Synthetic oligonucleotide
  Antisense strand to SEQ ID NO: 2583604
aagucagugacuaaucagu

SEQ ID NO: 2583606 - RNA, 19 nt, Artificial Sequence
  Description of Artificial Sequence: Synthetic oligonucleotide
  Sense strand starting at position 1839 of SEQ ID NO: 1889183
cugauuagucacugacuuc

SEQ ID NO: 2583607 - RNA, 19 nt, Artificial Sequence
  Description of Artificial Sequence: Synthetic oligonucleotide
  Antisense strand to SEQ ID NO: 2583606
gaagucagugacuaaucag

SEQ ID NO: 2583608 - RNA, 19 nt, Artificial Sequence
  Description of Artificial Sequence: Synthetic oligonucleotide
  Sense strand starting at position 1995 of SEQ ID NO: 1889183
ccuggcgaugggugaauaa

SEQ ID NO: 2583609 - RNA, 19 nt, Artificial Sequence
  Description of Artificial Sequence: Synthetic oligonucleotide
  Antisense strand to SEQ ID NO: 2583608
uuauucacccaucgccagg

SEQ ID NO: 2583610 - RNA, 19 nt, Artificial Sequence
  Description of Artificial Sequence: Synthetic oligonucleotide
  Sense strand starting at position 2080 of SEQ ID NO: 1889183
cggagaguccuguaaagaa

SEQ ID NO: 2583611 - RNA, 19 nt, Artificial Sequence
  Description of Artificial Sequence: Synthetic oligonucleotide
  Antisense strand to SEQ ID NO: 2583610
uucuuuacaggacucuccg

SEQ ID NO: 2583612 - RNA, 19 nt, Artificial Sequence
  Description of Artificial Sequence: Synthetic oligonucleotide
  Sense strand starting at position 2202 of SEQ ID NO: 1889183
gagaauaguucugugaaug

SEQ ID NO: 2583613 - RNA, 19 nt, Artificial Sequence
  Description of Artificial Sequence: Synthetic oligonucleotide
  Antisense strand to SEQ ID NO: 2583612
cauucacagaacuauucuc

SEQ ID NO: 2583614 - RNA, 19 nt, Artificial Sequence
  Description of Artificial Sequence: Synthetic oligonucleotide
  Sense strand starting at position 2203 of SEQ ID NO: 1889183
agaauaguucugugaauga

SEQ ID NO: 2583615 - RNA, 19 nt, Artificial Sequence
  Description of Artificial Sequence: Synthetic oligonucleotide
  Antisense strand to SEQ ID NO: 2583614
ucauucacagaacuauucu

SEQ ID NO: 2583616 - RNA, 19 nt, Artificial Sequence
  Description of Artificial Sequence: Synthetic oligonucleotide
  Sense strand starting at position 2207 of SEQ ID NO: 1889183
uaguucugugaaugauuaa

SEQ ID NO: 2583617 - RNA, 19 nt, Artificial Sequence
  Description of Artificial Sequence: Synthetic oligonucleotide
  Antisense strand to SEQ ID NO: 2583616
uuaaucauucacagaacua

SEQ ID NO: 2583618 - RNA, 19 nt, Artificial Sequence
  Description of Artificial Sequence: Synthetic oligonucleotide
  Sense strand starting at position 2232 of SEQ ID NO: 1889183
guuaccacagucuaaagua

SEQ ID NO: 2583619 - RNA, 19 nt, Artificial Sequence
  Description of Artificial Sequence: Synthetic oligonucleotide
  Antisense strand to SEQ ID NO: 2583618
uacuuuagacugugguaac

SEQ ID NO: 2583620 - RNA, 19 nt, Artificial Sequence
  Description of Artificial Sequence: Synthetic oligonucleotide
  Sense strand starting at position 2262 of SEQ ID NO: 1889183
gggcaauuucucuggucga

SEQ ID NO: 2583621 - RNA, 19 nt, Artificial Sequence
  Description of Artificial Sequence: Synthetic oligonucleotide
  Antisense strand to SEQ ID NO: 2583620
ucgaccagagaaauugccc

SEQ ID NO: 2583622 - RNA, 19 nt, Artificial Sequence
  Description of Artificial Sequence: Synthetic oligonucleotide
  Sense strand starting at position 2276 of SEQ ID NO: 1889183
gucgaacucccuggagaga

SEQ ID NO: 2583623 - RNA, 19 nt, Artificial Sequence
  Description of Artificial Sequence: Synthetic oligonucleotide
  Antisense strand to SEQ ID NO: 2583622
ucucuccagggaguucgac

SEQ ID NO: 2583624 - RNA, 19 nt, Artificial Sequence
  Description of Artificial Sequence: Synthetic oligonucleotide
  Sense strand starting at position 2298 of SEQ ID NO: 1889183
aucuuaguuaguggaggua

SEQ ID NO: 2583625 - RNA, 19 nt, Artificial Sequence
  Description of Artificial Sequence: Synthetic oligonucleotide
  Antisense strand to SEQ ID NO: 2583624
uaccuccacuaacuaagau

SEQ ID NO: 2583626 - RNA, 19 nt, Artificial Sequence
  Description of Artificial Sequence: Synthetic oligonucleotide
  Sense strand starting at position 2691 of SEQ ID NO: 1889183
ugauuaccgucaguuuaaa

SEQ ID NO: 2583627 - RNA, 19 nt, Artificial Sequence
  Description of Artificial Sequence: Synthetic oligonucleotide
  Antisense strand to SEQ ID NO: 2583626
uuuaaacugacgguaauca

SEQ ID NO: 2583628 - RNA, 19 nt, Artificial Sequence
  Description of Artificial Sequence: Synthetic oligonucleotide
  Sense strand starting at position 2788 of SEQ ID NO: 1889183
ugcaauuguugggugaaac

SEQ ID NO: 2583629 - RNA, 19 nt, Artificial Sequence
  Description of Artificial Sequence: Synthetic oligonucleotide
  Antisense strand to SEQ ID NO: 2583628
guuucacccaacaauugca

SEQ ID NO: 2583630 - RNA, 19 nt, Artificial Sequence
  Description of Artificial Sequence: Synthetic oligonucleotide
  Sense strand starting at position 2789 of SEQ ID NO: 1889183
gcaauuguugggugaaaca

SEQ ID NO: 2583631 - RNA, 19 nt, Artificial Sequence
  Description of Artificial Sequence: Synthetic oligonucleotide
  Antisense strand to SEQ ID NO: 2583630
uguuucacccaacaauugc

SEQ ID NO: 2583632 - RNA, 19 nt, Artificial Sequence
  Description of Artificial Sequence: Synthetic oligonucleotide
  Sense strand starting at position 2971 of SEQ ID NO: 1889183
uccaauuugugucuuguuu

SEQ ID NO: 2583633 - RNA, 19 nt, Artificial Sequence
  Description of Artificial Sequence: Synthetic oligonucleotide
  Antisense strand to SEQ ID NO: 2583632
aaacaagacacaaauugga

SEQ ID NO: 2583634 - RNA, 19 nt, Artificial Sequence
  Description of Artificial Sequence: Synthetic oligonucleotide
  Sense strand starting at position 2975 of SEQ ID NO: 1889183
auuugugucuuguuugaaa

SEQ ID NO: 2583635 - RNA, 19 nt, Artificial Sequence
  Description of Artificial Sequence: Synthetic oligonucleotide
  Antisense strand to SEQ ID NO: 2583634
uuucaaacaagacacaaau

SEQ ID NO: 2583636 - RNA, 19 nt, Artificial Sequence
  Description of Artificial Sequence: Synthetic oligonucleotide
  Sense strand starting at position 3251 of SEQ ID NO: 1889183
ucaguuuauuugucuuuac

SEQ ID NO: 2583637 - RNA, 19 nt, Artificial Sequence
  Description of Artificial Sequence: Synthetic oligonucleotide
  Antisense strand to SEQ ID NO: 2583636
guaaagacaaauaaacuga

SEQ ID NO: 2583638 - RNA, 19 nt, Artificial Sequence
  Description of Artificial Sequence: Synthetic oligonucleotide
  Sense strand starting at position 3449 of SEQ ID NO: 1889183
aucuccaauccaggguaua

SEQ ID NO: 2583639 - RNA, 19 nt, Artificial Sequence
  Description of Artificial Sequence: Synthetic oligonucleotide
  Antisense strand to SEQ ID NO: 2583638
uauacccuggauuggagau

SEQ ID NO: 2583640 - RNA, 19 nt, Artificial Sequence
  Description of Artificial Sequence: Synthetic oligonucleotide
  Sense strand starting at position 3479 of SEQ ID NO: 1889183
cuagcaggauugcuaagau

SEQ ID NO: 2583641 - RNA, 19 nt, Artificial Sequence
  Description of Artificial Sequence: Synthetic oligonucleotide
  Antisense strand to SEQ ID NO: 2583640
aucuuagcaauccugcuag

SEQ ID NO: 2583642 - RNA, 19 nt, Artificial Sequence
  Description of Artificial Sequence: Synthetic oligonucleotide
  Sense strand starting at position 3615 of SEQ ID NO: 1889183
cccuuuauuugugugccaa

SEQ ID NO: 2583643 - RNA, 19 nt, Artificial Sequence
  Description of Artificial Sequence: Synthetic oligonucleotide
  Antisense strand to SEQ ID NO: 2583642
uuggcacacaaauaaaggg

SEQ ID NO: 2583644 - RNA, 19 nt, Artificial Sequence
  Description of Artificial Sequence: Synthetic oligonucleotide
  Sense strand starting at position 3616 of SEQ ID NO: 1889183
ccuuuauuugugugccaau

SEQ ID NO: 2583645 - RNA, 19 nt, Artificial Sequence
  Description of Artificial Sequence: Synthetic oligonucleotide
  Antisense strand to SEQ ID NO: 2583644
auuggcacacaaauaaagg

SEQ ID NO: 2583646 - RNA, 19 nt, Artificial Sequence
  Description of Artificial Sequence: Synthetic oligonucleotide
  Sense strand starting at position 3644 of SEQ ID NO: 1889183
acacauaauccuggguacu

SEQ ID NO: 2583647 - RNA, 19 nt, Artificial Sequence
  Description of Artificial Sequence: Synthetic oligonucleotide
  Antisense strand to SEQ ID NO: 2583646
aguacccaggauuaugugu

SEQ ID NO: 2583648 - RNA, 19 nt, Artificial Sequence
  Description of Artificial Sequence: Synthetic oligonucleotide
  Sense strand starting at position 3971 of SEQ ID NO: 1889183
ucaccaggcugguuugaaa

SEQ ID NO: 2583649 - RNA, 19 nt, Artificial Sequence
  Description of Artificial Sequence: Synthetic oligonucleotide
  Antisense strand to SEQ ID NO: 2583648
uuucaaaccagccugguga

SEQ ID NO: 2583650 - RNA, 19 nt, Artificial Sequence
  Description of Artificial Sequence: Synthetic oligonucleotide
  Sense strand starting at position 2299 of SEQ ID NO: 1889184
aucuuaguuaguggaggua

SEQ ID NO: 2583651 - RNA, 19 nt, Artificial Sequence
  Description of Artificial Sequence: Synthetic oligonucleotide
  Antisense strand to SEQ ID NO: 2583650
uaccuccacuaacuaagau

SEQ ID NO: 2583652 - RNA, 19 nt, Artificial Sequence
  Description of Artificial Sequence: Synthetic oligonucleotide
  Sense strand starting at position 2286 of SEQ ID NO: 1889185
ccuggagagagccauguua

SEQ ID NO: 2583653 - RNA, 19 nt, Artificial Sequence
  Description of Artificial Sequence: Synthetic oligonucleotide
  Antisense strand to SEQ ID NO: 2583652
uaacauggcucucuccagg

SEQ ID NO: 2583654 - RNA, 19 nt, Artificial Sequence
  Description of Artificial Sequence: Synthetic oligonucleotide
  Sense strand starting at position 2288 of SEQ ID NO: 1889185
uggagagagccauguuagu

SEQ ID NO: 2583655 - RNA, 19 nt, Artificial Sequence
  Description of Artificial Sequence: Synthetic oligonucleotide
  Antisense strand to SEQ ID NO: 2583654
acuaacauggcucucucca

SEQ ID NO: 2583656 - RNA, 19 nt, Artificial Sequence
  Description of Artificial Sequence: Synthetic oligonucleotide
  Sense strand starting at position 2299 of SEQ ID NO: 1889185
auguuaguuaguggaggua

SEQ ID NO: 2583657 - RNA, 19 nt, Artificial Sequence
  Description of Artificial Sequence: Synthetic oligonucleotide
  Antisense strand to SEQ ID NO: 2583656
uaccuccacuaacuaacau

SEQ ID NO: 2583658 - RNA, 19 nt, Artificial Sequence
  Description of Artificial Sequence: Synthetic oligonucleotide
  Sense strand starting at position 2301 of SEQ ID NO: 1889185
guuaguuaguggagguaga

SEQ ID NO: 2583659 - RNA, 19 nt, Artificial Sequence
  Description of Artificial Sequence: Synthetic oligonucleotide
  Antisense strand to SEQ ID NO: 2583658
ucuaccuccacuaacuaac

SEQ ID NO: 2583660 - RNA, 19 nt, Artificial Sequence
  Description of Artificial Sequence: Synthetic oligonucleotide
  Sense strand starting at position 128 of SEQ ID NO: 1889186
ugaggcgucccauauccua

SEQ ID NO: 2583661 - RNA, 19 nt, Artificial Sequence
  Description of Artificial Sequence: Synthetic oligonucleotide
  Antisense strand to SEQ ID NO: 2583660
uaggauaugggacgccuca

SEQ ID NO: 2583662 - RNA, 19 nt, Artificial Sequence
  Description of Artificial Sequence: Synthetic oligonucleotide
  Sense strand starting at position 163 of SEQ ID NO: 1889186
uuguuaagccuguuugucu

SEQ ID NO: 2583663 - RNA, 19 nt, Artificial Sequence
  Description of Artificial Sequence: Synthetic oligonucleotide
  Antisense strand to SEQ ID NO: 2583662
agacaaacaggcuuaacaa

SEQ ID NO: 2583664 - RNA, 19 nt, Artificial Sequence
  Description of Artificial Sequence: Synthetic oligonucleotide
  Sense strand starting at position 303 of SEQ ID NO: 1889186
cagaaauaguucuuacagg

SEQ ID NO: 2583665 - RNA, 19 nt, Artificial Sequence
  Description of Artificial Sequence: Synthetic oligonucleotide
  Antisense strand to SEQ ID NO: 2583664
ccuguaagaacuauuucug

SEQ ID NO: 2583666 - RNA, 19 nt, Artificial Sequence
  Description of Artificial Sequence: Synthetic oligonucleotide
  Sense strand starting at position 471 of SEQ ID NO: 1889186
gggcgacaugacuaagagu

SEQ ID NO: 2583667 - RNA, 19 nt, Artificial Sequence
  Description of Artificial Sequence: Synthetic oligonucleotide
  Antisense strand to SEQ ID NO: 2583666
acucuuagucaugucgccc

SEQ ID NO: 2583668 - RNA, 19 nt, Artificial Sequence
  Description of Artificial Sequence: Synthetic oligonucleotide
  Sense strand starting at position 725 of SEQ ID NO: 1889186
ccugcuauuuagcccuaga

SEQ ID NO: 2583669 - RNA, 19 nt, Artificial Sequence
  Description of Artificial Sequence: Synthetic oligonucleotide
  Antisense strand to SEQ ID NO: 2583668
ucuagggcuaaauagcagg

SEQ ID NO: 2583670 - RNA, 19 nt, Artificial Sequence
  Description of Artificial Sequence: Synthetic oligonucleotide
  Sense strand starting at position 844 of SEQ ID NO: 1889186
uggaauugauuccuuccca

SEQ ID NO: 2583671 - RNA, 19 nt, Artificial Sequence
  Description of Artificial Sequence: Synthetic oligonucleotide
  Antisense strand to SEQ ID NO: 2583670
ugggaaggaaucaauucca

SEQ ID NO: 2583672 - RNA, 19 nt, Artificial Sequence
  Description of Artificial Sequence: Synthetic oligonucleotide
  Sense strand starting at position 845 of SEQ ID NO: 1889186
ggaauugauuccuucccau

SEQ ID NO: 2583673 - RNA, 19 nt, Artificial Sequence
  Description of Artificial Sequence: Synthetic oligonucleotide
  Antisense strand to SEQ ID NO: 2583672
augggaaggaaucaauucc

SEQ ID NO: 2583674 - RNA, 19 nt, Artificial Sequence
  Description of Artificial Sequence: Synthetic oligonucleotide
  Sense strand starting at position 1078 of SEQ ID NO: 1889186
cgcugacuucgggagugaa

SEQ ID NO: 2583675 - RNA, 19 nt, Artificial Sequence
  Description of Artificial Sequence: Synthetic oligonucleotide
  Antisense strand to SEQ ID NO: 2583674
uucacucccgaagucagcg

SEQ ID NO: 2583676 - RNA, 19 nt, Artificial Sequence
  Description of Artificial Sequence: Synthetic oligonucleotide
  Sense strand starting at position 1137 of SEQ ID NO: 1889186
ggugcauccaguguuguuu

SEQ ID NO: 2583677 - RNA, 19 nt, Artificial Sequence
  Description of Artificial Sequence: Synthetic oligonucleotide
  Antisense strand to SEQ ID NO: 2583676
aaacaacacuggaugcacc

SEQ ID NO: 2583678 - RNA, 19 nt, Artificial Sequence
  Description of Artificial Sequence: Synthetic oligonucleotide
  Sense strand starting at position 1411 of SEQ ID NO: 1889186
agugcugaucggucuguuu

SEQ ID NO: 2583679 - RNA, 19 nt, Artificial Sequence
  Description of Artificial Sequence: Synthetic oligonucleotide
  Antisense strand to SEQ ID NO: 2583678
aaacagaccgaucagcacu

SEQ ID NO: 2583680 - RNA, 19 nt, Artificial Sequence
  Description of Artificial Sequence: Synthetic oligonucleotide
  Sense strand starting at position 1537 of SEQ ID NO: 1889186
ccugauuagcucuacacag

SEQ ID NO: 2583681 - RNA, 19 nt, Artificial Sequence
  Description of Artificial Sequence: Synthetic oligonucleotide
  Antisense strand to SEQ ID NO: 2583680
cuguguagagcuaaucagg

SEQ ID NO: 2583682 - RNA, 19 nt, Artificial Sequence
  Description of Artificial Sequence: Synthetic oligonucleotide
  Sense strand starting at position 1743 of SEQ ID NO: 1889186
uucuguugagcugauaaau

SEQ ID NO: 2583683 - RNA, 19 nt, Artificial Sequence
  Description of Artificial Sequence: Synthetic oligonucleotide
  Antisense strand to SEQ ID NO: 2583682
auuuaucagcucaacagaa

SEQ ID NO: 2583684 - RNA, 19 nt, Artificial Sequence
  Description of Artificial Sequence: Synthetic oligonucleotide
  Sense strand starting at position 1754 of SEQ ID NO: 1889186
ugauaaauguugucccaug

SEQ ID NO: 2583685 - RNA, 19 nt, Artificial Sequence
  Description of Artificial Sequence: Synthetic oligonucleotide
  Antisense strand to SEQ ID NO: 2583684
caugggacaacauuuauca

SEQ ID NO: 2583686 - RNA, 19 nt, Artificial Sequence
  Description of Artificial Sequence: Synthetic oligonucleotide
  Sense strand starting at position 1755 of SEQ ID NO: 1889186
gauaaauguugucccauga

SEQ ID NO: 2583687 - RNA, 19 nt, Artificial Sequence
  Description of Artificial Sequence: Synthetic oligonucleotide
  Antisense strand to SEQ ID NO: 2583686
ucaugggacaacauuuauc

SEQ ID NO: 2583688 - RNA, 19 nt, Artificial Sequence
  Description of Artificial Sequence: Synthetic oligonucleotide
  Sense strand starting at position 1759 of SEQ ID NO: 1889186
aauguugucccaugagaau

SEQ ID NO: 2583689 - RNA, 19 nt, Artificial Sequence
  Description of Artificial Sequence: Synthetic oligonucleotide
  Antisense strand to SEQ ID NO: 2583688
auucucaugggacaacauu

SEQ ID NO: 2583690 - RNA, 19 nt, Artificial Sequence
  Description of Artificial Sequence: Synthetic oligonucleotide
  Sense strand starting at position 1831 of SEQ ID NO: 1889186
augacuuacugauuaguca

SEQ ID NO: 2583691 - RNA, 19 nt, Artificial Sequence
  Description of Artificial Sequence: Synthetic oligonucleotide
  Antisense strand to SEQ ID NO: 2583690
ugacuaaucaguaagucau

SEQ ID NO: 2583692 - RNA, 19 nt, Artificial Sequence
  Description of Artificial Sequence: Synthetic oligonucleotide
  Sense strand starting at position 1835 of SEQ ID NO: 1889186
cuuacugauuagucacuga

SEQ ID NO: 2583693 - RNA, 19 nt, Artificial Sequence
  Description of Artificial Sequence: Synthetic oligonucleotide
  Antisense strand to SEQ ID NO: 2583692
ucagugacuaaucaguaag

SEQ ID NO: 2583694 - RNA, 19 nt, Artificial Sequence
  Description of Artificial Sequence: Synthetic oligonucleotide
  Sense strand starting at position 1838 of SEQ ID NO: 1889186
acugauuagucacugacuu

SEQ ID NO: 2583695 - RNA, 19 nt, Artificial Sequence
  Description of Artificial Sequence: Synthetic oligonucleotide
  Antisense strand to SEQ ID NO: 2583694
aagucagugacuaaucagu

SEQ ID NO: 2583696 - RNA, 19 nt, Artificial Sequence
  Description of Artificial Sequence: Synthetic oligonucleotide
  Sense strand starting at position 1839 of SEQ ID NO: 1889186
cugauuagucacugacuuc

SEQ ID NO: 2583697 - RNA, 19 nt, Artificial Sequence
  Description of Artificial Sequence: Synthetic oligonucleotide
  Antisense strand to SEQ ID NO: 2583696
gaagucagugacuaaucag

SEQ ID NO: 2583698 - RNA, 19 nt, Artificial Sequence
  Description of Artificial Sequence: Synthetic oligonucleotide
  Sense strand starting at position 1995 of SEQ ID NO: 1889186
ccuggcgaugggugaauaa

SEQ ID NO: 2583699 - RNA, 19 nt, Artificial Sequence
  Description of Artificial Sequence: Synthetic oligonucleotide
  Antisense strand to SEQ ID NO: 2583698
uuauucacccaucgccagg

SEQ ID NO: 2583700 - RNA, 19 nt, Artificial Sequence
  Description of Artificial Sequence: Synthetic oligonucleotide
  Sense strand starting at position 2080 of SEQ ID NO: 1889186
cggagaguccuguaaagaa

SEQ ID NO: 2583701 - RNA, 19 nt, Artificial Sequence
  Description of Artificial Sequence: Synthetic oligonucleotide
  Antisense strand to SEQ ID NO: 2583700
uucuuuacaggacucuccg

SEQ ID NO: 2583702 - RNA, 19 nt, Artificial Sequence
  Description of Artificial Sequence: Synthetic oligonucleotide
  Sense strand starting at position 2202 of SEQ ID NO: 1889186
gagaauaguucugugaaug

SEQ ID NO: 2583703 - RNA, 19 nt, Artificial Sequence
  Description of Artificial Sequence: Synthetic oligonucleotide
  Antisense strand to SEQ ID NO: 2583702
cauucacagaacuauucuc

SEQ ID NO: 2583704 - RNA, 19 nt, Artificial Sequence
  Description of Artificial Sequence: Synthetic oligonucleotide
  Sense strand starting at position 2203 of SEQ ID NO: 1889186
agaauaguucugugaauga

SEQ ID NO: 2583705 - RNA, 19 nt, Artificial Sequence
  Description of Artificial Sequence: Synthetic oligonucleotide
  Antisense strand to SEQ ID NO: 2583704
ucauucacagaacuauucu

SEQ ID NO: 2583706 - RNA, 19 nt, Artificial Sequence
  Description of Artificial Sequence: Synthetic oligonucleotide
  Sense strand starting at position 2207 of SEQ ID NO: 1889186
uaguucugugaaugauuaa

SEQ ID NO: 2583707 - RNA, 19 nt, Artificial Sequence
  Description of Artificial Sequence: Synthetic oligonucleotide
  Antisense strand to SEQ ID NO: 2583706
uuaaucauucacagaacua

SEQ ID NO: 2583708 - RNA, 19 nt, Artificial Sequence
  Description of Artificial Sequence: Synthetic oligonucleotide
  Sense strand starting at position 2232 of SEQ ID NO: 1889186
guuaccacagucuaaagua

SEQ ID NO: 2583709 - RNA, 19 nt, Artificial Sequence
  Description of Artificial Sequence: Synthetic oligonucleotide
  Antisense strand to SEQ ID NO: 2583708
uacuuuagacugugguaac

SEQ ID NO: 2583710 - RNA, 19 nt, Artificial Sequence
  Description of Artificial Sequence: Synthetic oligonucleotide
  Sense strand starting at position 2262 of SEQ ID NO: 1889186
gggcaauuucucuggucga

SEQ ID NO: 2583711 - RNA, 19 nt, Artificial Sequence
  Description of Artificial Sequence: Synthetic oligonucleotide
  Antisense strand to SEQ ID NO: 2583710
ucgaccagagaaauugccc

SEQ ID NO: 2583712 - RNA, 19 nt, Artificial Sequence
  Description of Artificial Sequence: Synthetic oligonucleotide
  Sense strand starting at position 2276 of SEQ ID NO: 1889186
gucgaacucccuggagaga

SEQ ID NO: 2583713 - RNA, 19 nt, Artificial Sequence
  Description of Artificial Sequence: Synthetic oligonucleotide
  Antisense strand to SEQ ID NO: 2583712
ucucuccagggaguucgac

SEQ ID NO: 2583714 - RNA, 19 nt, Artificial Sequence
  Description of Artificial Sequence: Synthetic oligonucleotide
  Sense strand starting at position 2298 of SEQ ID NO: 1889186
aucuuaguuaguggaggua

SEQ ID NO: 2583715 - RNA, 19 nt, Artificial Sequence
  Description of Artificial Sequence: Synthetic oligonucleotide
  Antisense strand to SEQ ID NO: 2583714
uaccuccacuaacuaagau

SEQ ID NO: 2583716 - RNA, 19 nt, Artificial Sequence
  Description of Artificial Sequence: Synthetic oligonucleotide
  Sense strand starting at position 2691 of SEQ ID NO: 1889186
ugauuaccgucaguuuaaa

SEQ ID NO: 2583717 - RNA, 19 nt, Artificial Sequence
  Description of Artificial Sequence: Synthetic oligonucleotide
  Antisense strand to SEQ ID NO: 2583716
uuuaaacugacgguaauca

SEQ ID NO: 2583718 - RNA, 19 nt, Artificial Sequence
  Description of Artificial Sequence: Synthetic oligonucleotide
  Sense strand starting at position 2788 of SEQ ID NO: 1889186
ugcaauuguugggugaaac

SEQ ID NO: 2583719 - RNA, 19 nt, Artificial Sequence
  Description of Artificial Sequence: Synthetic oligonucleotide
  Antisense strand to SEQ ID NO: 2583718
guuucacccaacaauugca

SEQ ID NO: 2583720 - RNA, 19 nt, Artificial Sequence
  Description of Artificial Sequence: Synthetic oligonucleotide
  Sense strand starting at position 2789 of SEQ ID NO: 1889186
gcaauuguugggugaaaca

SEQ ID NO: 2583721 - RNA, 19 nt, Artificial Sequence
  Description of Artificial Sequence: Synthetic oligonucleotide
  Antisense strand to SEQ ID NO: 2583720
uguuucacccaacaauugc

SEQ ID NO: 2583722 - RNA, 19 nt, Artificial Sequence
  Description of Artificial Sequence: Synthetic oligonucleotide
  Sense strand starting at position 2971 of SEQ ID NO: 1889186
uccaauuugugucuuguuu

SEQ ID NO: 2583723 - RNA, 19 nt, Artificial Sequence
  Description of Artificial Sequence: Synthetic oligonucleotide
  Antisense strand to SEQ ID NO: 2583722
aaacaagacacaaauugga

SEQ ID NO: 2583724 - RNA, 19 nt, Artificial Sequence
  Description of Artificial Sequence: Synthetic oligonucleotide
  Sense strand starting at position 2975 of SEQ ID NO: 1889186
auuugugucuuguuugaaa

SEQ ID NO: 2583725 - RNA, 19 nt, Artificial Sequence
  Description of Artificial Sequence: Synthetic oligonucleotide
  Antisense strand to SEQ ID NO: 2583724
uuucaaacaagacacaaau

SEQ ID NO: 2583726 - RNA, 19 nt, Artificial Sequence
  Description of Artificial Sequence: Synthetic oligonucleotide
  Sense strand starting at position 3251 of SEQ ID NO: 1889186
ucaguuuauuugucuuuac

SEQ ID NO: 2583727 - RNA, 19 nt, Artificial Sequence
  Description of Artificial Sequence: Synthetic oligonucleotide
  Antisense strand to SEQ ID NO: 2583726
guaaagacaaauaaacuga

SEQ ID NO: 2583728 - RNA, 19 nt, Artificial Sequence
  Description of Artificial Sequence: Synthetic oligonucleotide
  Sense strand starting at position 3449 of SEQ ID NO: 1889186
aucuccaauccaggguaua

SEQ ID NO: 2583729 - RNA, 19 nt, Artificial Sequence
  Description of Artificial Sequence: Synthetic oligonucleotide
  Antisense strand to SEQ ID NO: 2583728
uauacccuggauuggagau

SEQ ID NO: 2583730 - RNA, 19 nt, Artificial Sequence
  Description of Artificial Sequence: Synthetic oligonucleotide
  Sense strand starting at position 3479 of SEQ ID NO: 1889186
cuagcaggauugcuaagau

SEQ ID NO: 2583731 - RNA, 19 nt, Artificial Sequence
  Description of Artificial Sequence: Synthetic oligonucleotide
  Antisense strand to SEQ ID NO: 2583730
aucuuagcaauccugcuag

SEQ ID NO: 2583732 - RNA, 19 nt, Artificial Sequence
  Description of Artificial Sequence: Synthetic oligonucleotide
  Sense strand starting at position 3615 of SEQ ID NO: 1889186
cccuuuauuugugugccaa

SEQ ID NO: 2583733 - RNA, 19 nt, Artificial Sequence
  Description of Artificial Sequence: Synthetic oligonucleotide
  Antisense strand to SEQ ID NO: 2583732
uuggcacacaaauaaaggg

SEQ ID NO: 2583734 - RNA, 19 nt, Artificial Sequence
  Description of Artificial Sequence: Synthetic oligonucleotide
  Sense strand starting at position 3616 of SEQ ID NO: 1889186
ccuuuauuugugugccaau

SEQ ID NO: 2583735 - RNA, 19 nt, Artificial Sequence
  Description of Artificial Sequence: Synthetic oligonucleotide
  Antisense strand to SEQ ID NO: 2583734
auuggcacacaaauaaagg

SEQ ID NO: 2583736 - RNA, 19 nt, Artificial Sequence
  Description of Artificial Sequence: Synthetic oligonucleotide
  Sense strand starting at position 3644 of SEQ ID NO: 1889186
acacauaauccuggguacu

SEQ ID NO: 2583737 - RNA, 19 nt, Artificial Sequence
  Description of Artificial Sequence: Synthetic oligonucleotide
  Antisense strand to SEQ ID NO: 2583736
aguacccaggauuaugugu

SEQ ID NO: 2583738 - RNA, 19 nt, Artificial Sequence
  Description of Artificial Sequence: Synthetic oligonucleotide
  Sense strand starting at position 3971 of SEQ ID NO: 1889186
ucaccaggcugguuugaaa

SEQ ID NO: 2583739 - RNA, 19 nt, Artificial Sequence
  Description of Artificial Sequence: Synthetic oligonucleotide
  Antisense strand to SEQ ID NO: 2583738
uuucaaaccagccugguga

SEQ ID NO: 2583740 - RNA, 19 nt, Artificial Sequence
  Description of Artificial Sequence: Synthetic oligonucleotide
  Sense strand starting at position 117 of SEQ ID NO: 1889187
guggcugagcauuaagguu

SEQ ID NO: 2583741 - RNA, 19 nt, Artificial Sequence
  Description of Artificial Sequence: Synthetic oligonucleotide
  Antisense strand to SEQ ID NO: 2583740
aaccuuaaugcucagccac

SEQ ID NO: 2583742 - RNA, 19 nt, Artificial Sequence
  Description of Artificial Sequence: Synthetic oligonucleotide
  Sense strand starting at position 132 of SEQ ID NO: 1889187
gguucaucugaguauuggu

SEQ ID NO: 2583743 - RNA, 19 nt, Artificial Sequence
  Description of Artificial Sequence: Synthetic oligonucleotide
  Antisense strand to SEQ ID NO: 2583742
accaauacucagaugaacc

SEQ ID NO: 2583744 - RNA, 19 nt, Artificial Sequence
  Description of Artificial Sequence: Synthetic oligonucleotide
  Sense strand starting at position 350 of SEQ ID NO: 1889187
gaccacuggguuugacaau

SEQ ID NO: 2583745 - RNA, 19 nt, Artificial Sequence
  Description of Artificial Sequence: Synthetic oligonucleotide
  Antisense strand to SEQ ID NO: 2583744
auugucaaacccagugguc

SEQ ID NO: 2583746 - RNA, 19 nt, Artificial Sequence
  Description of Artificial Sequence: Synthetic oligonucleotide
  Sense strand starting at position 407 of SEQ ID NO: 1889187
cacgaagaguccucacagu

SEQ ID NO: 2583747 - RNA, 19 nt, Artificial Sequence
  Description of Artificial Sequence: Synthetic oligonucleotide
  Antisense strand to SEQ ID NO: 2583746
acugugaggacucuucgug

SEQ ID NO: 2583748 - RNA, 19 nt, Artificial Sequence
  Description of Artificial Sequence: Synthetic oligonucleotide
  Sense strand starting at position 423 of SEQ ID NO: 1889187
aguucucaugaauggcaga

SEQ ID NO: 2583749 - RNA, 19 nt, Artificial Sequence
  Description of Artificial Sequence: Synthetic oligonucleotide
  Antisense strand to SEQ ID NO: 2583748
ucugccauucaugagaacu

SEQ ID NO: 2583750 - RNA, 19 nt, Artificial Sequence
  Description of Artificial Sequence: Synthetic oligonucleotide
  Sense strand starting at position 606 of SEQ ID NO: 1889187
gggauucacugucugggaa

SEQ ID NO: 2583751 - RNA, 19 nt, Artificial Sequence
  Description of Artificial Sequence: Synthetic oligonucleotide
  Antisense strand to SEQ ID NO: 2583750
uucccagacagugaauccc

SEQ ID NO: 2583752 - RNA, 19 nt, Artificial Sequence
  Description of Artificial Sequence: Synthetic oligonucleotide
  Sense strand starting at position 607 of SEQ ID NO: 1889187
ggauucacugucugggaau

SEQ ID NO: 2583753 - RNA, 19 nt, Artificial Sequence
  Description of Artificial Sequence: Synthetic oligonucleotide
  Antisense strand to SEQ ID NO: 2583752
auucccagacagugaaucc

SEQ ID NO: 2583754 - RNA, 19 nt, Artificial Sequence
  Description of Artificial Sequence: Synthetic oligonucleotide
  Sense strand starting at position 638 of SEQ ID NO: 1889187
gagagugucuagcccauga

SEQ ID NO: 2583755 - RNA, 19 nt, Artificial Sequence
  Description of Artificial Sequence: Synthetic oligonucleotide
  Antisense strand to SEQ ID NO: 2583754
ucaugggcuagacacucuc

SEQ ID NO: 2583756 - RNA, 19 nt, Artificial Sequence
  Description of Artificial Sequence: Synthetic oligonucleotide
  Sense strand starting at position 640 of SEQ ID NO: 1889187
gagugucuagcccaugaga

SEQ ID NO: 2583757 - RNA, 19 nt, Artificial Sequence
  Description of Artificial Sequence: Synthetic oligonucleotide
  Antisense strand to SEQ ID NO: 2583756
ucucaugggcuagacacuc

SEQ ID NO: 2583758 - RNA, 19 nt, Artificial Sequence
  Description of Artificial Sequence: Synthetic oligonucleotide
  Sense strand starting at position 642 of SEQ ID NO: 1889187
gugucuagcccaugagaga

SEQ ID NO: 2583759 - RNA, 19 nt, Artificial Sequence
  Description of Artificial Sequence: Synthetic oligonucleotide
  Antisense strand to SEQ ID NO: 2583758
ucucucaugggcuagacac

SEQ ID NO: 2583760 - RNA, 19 nt, Artificial Sequence
  Description of Artificial Sequence: Synthetic oligonucleotide
  Sense strand starting at position 729 of SEQ ID NO: 1889187
gucuguaaguggaggagaa

SEQ ID NO: 2583761 - RNA, 19 nt, Artificial Sequence
  Description of Artificial Sequence: Synthetic oligonucleotide
  Antisense strand to SEQ ID NO: 2583760
uucuccuccacuuacagac

SEQ ID NO: 2583762 - RNA, 19 nt, Artificial Sequence
  Description of Artificial Sequence: Synthetic oligonucleotide
  Sense strand starting at position 941 of SEQ ID NO: 1889187
gagcuuaagcuugagugga

SEQ ID NO: 2583763 - RNA, 19 nt, Artificial Sequence
  Description of Artificial Sequence: Synthetic oligonucleotide
  Antisense strand to SEQ ID NO: 2583762
uccacucaagcuuaagcuc

SEQ ID NO: 2583764 - RNA, 19 nt, Artificial Sequence
  Description of Artificial Sequence: Synthetic oligonucleotide
  Sense strand starting at position 966 of SEQ ID NO: 1889187
ggaggucuccagugucacu

SEQ ID NO: 2583765 - RNA, 19 nt, Artificial Sequence
  Description of Artificial Sequence: Synthetic oligonucleotide
  Antisense strand to SEQ ID NO: 2583764
agugacacuggagaccucc

SEQ ID NO: 2583766 - RNA, 19 nt, Artificial Sequence
  Description of Artificial Sequence: Synthetic oligonucleotide
  Sense strand starting at position 1061 of SEQ ID NO: 1889187
ggugucuugccaugacaga

SEQ ID NO: 2583767 - RNA, 19 nt, Artificial Sequence
  Description of Artificial Sequence: Synthetic oligonucleotide
  Antisense strand to SEQ ID NO: 2583766
ucugucauggcaagacacc

SEQ ID NO: 2583768 - RNA, 19 nt, Artificial Sequence
  Description of Artificial Sequence: Synthetic oligonucleotide
  Sense strand starting at position 1062 of SEQ ID NO: 1889187
gugucuugccaugacagau

SEQ ID NO: 2583769 - RNA, 19 nt, Artificial Sequence
  Description of Artificial Sequence: Synthetic oligonucleotide
  Antisense strand to SEQ ID NO: 2583768
aucugucauggcaagacac

SEQ ID NO: 2583770 - RNA, 19 nt, Artificial Sequence
  Description of Artificial Sequence: Synthetic oligonucleotide
  Sense strand starting at position 1275 of SEQ ID NO: 1889187
uguagauuccgagauccug

SEQ ID NO: 2583771 - RNA, 19 nt, Artificial Sequence
  Description of Artificial Sequence: Synthetic oligonucleotide
  Antisense strand to SEQ ID NO: 2583770
caggaucucggaaucuaca

SEQ ID NO: 2583772 - RNA, 19 nt, Artificial Sequence
  Description of Artificial Sequence: Synthetic oligonucleotide
  Sense strand starting at position 1516 of SEQ ID NO: 1889187
gcgccuaugagguauaccu

SEQ ID NO: 2583773 - RNA, 19 nt, Artificial Sequence
  Description of Artificial Sequence: Synthetic oligonucleotide
  Antisense strand to SEQ ID NO: 2583772
agguauaccucauaggcgc

SEQ ID NO: 2583774 - RNA, 19 nt, Artificial Sequence
  Description of Artificial Sequence: Synthetic oligonucleotide
  Sense strand starting at position 2029 of SEQ ID NO: 1889187
ggugguacugaauacagua

SEQ ID NO: 2583775 - RNA, 19 nt, Artificial Sequence
  Description of Artificial Sequence: Synthetic oligonucleotide
  Antisense strand to SEQ ID NO: 2583774
uacuguauucaguaccacc

SEQ ID NO: 2583776 - RNA, 19 nt, Artificial Sequence
  Description of Artificial Sequence: Synthetic oligonucleotide
  Sense strand starting at position 2122 of SEQ ID NO: 1889187
gugacacagcucuaacuaa

SEQ ID NO: 2583777 - RNA, 19 nt, Artificial Sequence
  Description of Artificial Sequence: Synthetic oligonucleotide
  Antisense strand to SEQ ID NO: 2583776
uuaguuagagcugugucac

SEQ ID NO: 2583778 - RNA, 19 nt, Artificial Sequence
  Description of Artificial Sequence: Synthetic oligonucleotide
  Sense strand starting at position 2144 of SEQ ID NO: 1889187
uccugcucucaugggacaa

SEQ ID NO: 2583779 - RNA, 19 nt, Artificial Sequence
  Description of Artificial Sequence: Synthetic oligonucleotide
  Antisense strand to SEQ ID NO: 2583778
uugucccaugagagcagga

SEQ ID NO: 2583780 - RNA, 19 nt, Artificial Sequence
  Description of Artificial Sequence: Synthetic oligonucleotide
  Sense strand starting at position 2207 of SEQ ID NO: 1889187
cugauaacacuaugcugaa

SEQ ID NO: 2583781 - RNA, 19 nt, Artificial Sequence
  Description of Artificial Sequence: Synthetic oligonucleotide
  Antisense strand to SEQ ID NO: 2583780
uucagcauaguguuaucag

SEQ ID NO: 2583782 - RNA, 19 nt, Artificial Sequence
  Description of Artificial Sequence: Synthetic oligonucleotide
  Sense strand starting at position 2208 of SEQ ID NO: 1889187
ugauaacacuaugcugaaa

SEQ ID NO: 2583783 - RNA, 19 nt, Artificial Sequence
  Description of Artificial Sequence: Synthetic oligonucleotide
  Antisense strand to SEQ ID NO: 2583782
uuucagcauaguguuauca

SEQ ID NO: 2583784 - RNA, 19 nt, Artificial Sequence
  Description of Artificial Sequence: Synthetic oligonucleotide
  Sense strand starting at position 2656 of SEQ ID NO: 1889187
cgagaagacaccggacaau

SEQ ID NO: 2583785 - RNA, 19 nt, Artificial Sequence
  Description of Artificial Sequence: Synthetic oligonucleotide
  Antisense strand to SEQ ID NO: 2583784
auuguccggugucuucucg

SEQ ID NO: 2583786 - RNA, 19 nt, Artificial Sequence
  Description of Artificial Sequence: Synthetic oligonucleotide
  Sense strand starting at position 2755 of SEQ ID NO: 1889187
gauugcagagacugauagu

SEQ ID NO: 2583787 - RNA, 19 nt, Artificial Sequence
  Description of Artificial Sequence: Synthetic oligonucleotide
  Antisense strand to SEQ ID NO: 2583786
acuaucagucucugcaauc

SEQ ID NO: 2583788 - RNA, 19 nt, Artificial Sequence
  Description of Artificial Sequence: Synthetic oligonucleotide
  Sense strand starting at position 2761 of SEQ ID NO: 1889187
agagacugauaguaaauua

SEQ ID NO: 2583789 - RNA, 19 nt, Artificial Sequence
  Description of Artificial Sequence: Synthetic oligonucleotide
  Antisense strand to SEQ ID NO: 2583788
uaauuuacuaucagucucu

SEQ ID NO: 2583790 - RNA, 19 nt, Artificial Sequence
  Description of Artificial Sequence: Synthetic oligonucleotide
  Sense strand starting at position 2907 of SEQ ID NO: 1889187
ggauaauugaguugucuac

SEQ ID NO: 2583791 - RNA, 19 nt, Artificial Sequence
  Description of Artificial Sequence: Synthetic oligonucleotide
  Antisense strand to SEQ ID NO: 2583790
guagacaacucaauuaucc

SEQ ID NO: 2583792 - RNA, 19 nt, Artificial Sequence
  Description of Artificial Sequence: Synthetic oligonucleotide
  Sense strand starting at position 2909 of SEQ ID NO: 1889187
auaauugaguugucuacug

SEQ ID NO: 2583793 - RNA, 19 nt, Artificial Sequence
  Description of Artificial Sequence: Synthetic oligonucleotide
  Antisense strand to SEQ ID NO: 2583792
caguagacaacucaauuau

SEQ ID NO: 2583794 - RNA, 19 nt, Artificial Sequence
  Description of Artificial Sequence: Synthetic oligonucleotide
  Sense strand starting at position 2931 of SEQ ID NO: 1889187
ugaguaauugaguaauugu

SEQ ID NO: 2583795 - RNA, 19 nt, Artificial Sequence
  Description of Artificial Sequence: Synthetic oligonucleotide
  Antisense strand to SEQ ID NO: 2583794
acaauuacucaauuacuca

SEQ ID NO: 2583796 - RNA, 19 nt, Artificial Sequence
  Description of Artificial Sequence: Synthetic oligonucleotide
  Sense strand starting at position 2934 of SEQ ID NO: 1889187
guaauugaguaauugugga

SEQ ID NO: 2583797 - RNA, 19 nt, Artificial Sequence
  Description of Artificial Sequence: Synthetic oligonucleotide
  Antisense strand to SEQ ID NO: 2583796
uccacaauuacucaauuac

SEQ ID NO: 2583798 - RNA, 19 nt, Artificial Sequence
  Description of Artificial Sequence: Synthetic oligonucleotide
  Sense strand starting at position 2939 of SEQ ID NO: 1889187
ugaguaauuguggagagcu

SEQ ID NO: 2583799 - RNA, 19 nt, Artificial Sequence
  Description of Artificial Sequence: Synthetic oligonucleotide
  Antisense strand to SEQ ID NO: 2583798
agcucuccacaauuacuca

SEQ ID NO: 2583800 - RNA, 19 nt, Artificial Sequence
  Description of Artificial Sequence: Synthetic oligonucleotide
  Sense strand starting at position 2941 of SEQ ID NO: 1889187
aguaauuguggagagcuuu

SEQ ID NO: 2583801 - RNA, 19 nt, Artificial Sequence
  Description of Artificial Sequence: Synthetic oligonucleotide
  Antisense strand to SEQ ID NO: 2583800
aaagcucuccacaauuacu

SEQ ID NO: 2583802 - RNA, 19 nt, Artificial Sequence
  Description of Artificial Sequence: Synthetic oligonucleotide
  Sense strand starting at position 2972 of SEQ ID NO: 1889187
cacgaaugcuacccuggaa

SEQ ID NO: 2583803 - RNA, 19 nt, Artificial Sequence
  Description of Artificial Sequence: Synthetic oligonucleotide
  Antisense strand to SEQ ID NO: 2583802
uuccaggguagcauucgug

SEQ ID NO: 2583804 - RNA, 19 nt, Artificial Sequence
  Description of Artificial Sequence: Synthetic oligonucleotide
  Sense strand starting at position 3106 of SEQ ID NO: 1889187
cucuuaucuggguaagggu

SEQ ID NO: 2583805 - RNA, 19 nt, Artificial Sequence
  Description of Artificial Sequence: Synthetic oligonucleotide
  Antisense strand to SEQ ID NO: 2583804
acccuuacccagauaagag

SEQ ID NO: 2583806 - RNA, 19 nt, Artificial Sequence
  Description of Artificial Sequence: Synthetic oligonucleotide
  Sense strand starting at position 3334 of SEQ ID NO: 1889187
aacugagguuuagaacaga

SEQ ID NO: 2583807 - RNA, 19 nt, Artificial Sequence
  Description of Artificial Sequence: Synthetic oligonucleotide
  Antisense strand to SEQ ID NO: 2583806
ucuguucuaaaccucaguu

SEQ ID NO: 2583808 - RNA, 19 nt, Artificial Sequence
  Description of Artificial Sequence: Synthetic oligonucleotide
  Sense strand starting at position 3548 of SEQ ID NO: 1889187
auugaaucccagugaugga

SEQ ID NO: 2583809 - RNA, 19 nt, Artificial Sequence
  Description of Artificial Sequence: Synthetic oligonucleotide
  Antisense strand to SEQ ID NO: 2583808
uccaucacugggauucaau

SEQ ID NO: 2583810 - RNA, 19 nt, Artificial Sequence
  Description of Artificial Sequence: Synthetic oligonucleotide
  Sense strand starting at position 3786 of SEQ ID NO: 1889187
cuaagcaaacauugugaua

SEQ ID NO: 2583811 - RNA, 19 nt, Artificial Sequence
  Description of Artificial Sequence: Synthetic oligonucleotide
  Antisense strand to SEQ ID NO: 2583810
uaucacaauguuugcuuag

SEQ ID NO: 2583812 - RNA, 19 nt, Artificial Sequence
  Description of Artificial Sequence: Synthetic oligonucleotide
  Sense strand starting at position 3798 of SEQ ID NO: 1889187
ugugauaccugcucucuac

SEQ ID NO: 2583813 - RNA, 19 nt, Artificial Sequence
  Description of Artificial Sequence: Synthetic oligonucleotide
  Antisense strand to SEQ ID NO: 2583812
guagagagcagguaucaca

SEQ ID NO: 2583814 - RNA, 19 nt, Artificial Sequence
  Description of Artificial Sequence: Synthetic oligonucleotide
  Sense strand starting at position 3854 of SEQ ID NO: 1889187
auauaugcgccaggauuua

SEQ ID NO: 2583815 - RNA, 19 nt, Artificial Sequence
  Description of Artificial Sequence: Synthetic oligonucleotide
  Antisense strand to SEQ ID NO: 2583814
uaaauccuggcgcauauau

SEQ ID NO: 2583816 - RNA, 19 nt, Artificial Sequence
  Description of Artificial Sequence: Synthetic oligonucleotide
  Sense strand starting at position 3866 of SEQ ID NO: 1889187
ggauuuaugucacaggccu

SEQ ID NO: 2583817 - RNA, 19 nt, Artificial Sequence
  Description of Artificial Sequence: Synthetic oligonucleotide
  Antisense strand to SEQ ID NO: 2583816
aggccugugacauaaaucc

SEQ ID NO: 2583818 - RNA, 19 nt, Artificial Sequence
  Description of Artificial Sequence: Synthetic oligonucleotide
  Sense strand starting at position 3905 of SEQ ID NO: 1889187
gggugugacugaagaauug

SEQ ID NO: 2583819 - RNA, 19 nt, Artificial Sequence
  Description of Artificial Sequence: Synthetic oligonucleotide
  Antisense strand to SEQ ID NO: 2583818
caauucuucagucacaccc

SEQ ID NO: 2583820 - RNA, 19 nt, Artificial Sequence
  Description of Artificial Sequence: Synthetic oligonucleotide
  Sense strand starting at position 15 of SEQ ID NO: 1889188
agaucaugaauccgcugua

SEQ ID NO: 2583821 - RNA, 19 nt, Artificial Sequence
  Description of Artificial Sequence: Synthetic oligonucleotide
  Antisense strand to SEQ ID NO: 2583820
uacagcggauucaugaucu

SEQ ID NO: 2583822 - RNA, 19 nt, Artificial Sequence
  Description of Artificial Sequence: Synthetic oligonucleotide
  Sense strand starting at position 16 of SEQ ID NO: 1889188
gaucaugaauccgcuguaa

SEQ ID NO: 2583823 - RNA, 19 nt, Artificial Sequence
  Description of Artificial Sequence: Synthetic oligonucleotide
  Antisense strand to SEQ ID NO: 2583822
uuacagcggauucaugauc

SEQ ID NO: 2583824 - RNA, 19 nt, Artificial Sequence
  Description of Artificial Sequence: Synthetic oligonucleotide
  Sense strand starting at position 18 of SEQ ID NO: 1889188
ucaugaauccgcuguaaau

SEQ ID NO: 2583825 - RNA, 19 nt, Artificial Sequence
  Description of Artificial Sequence: Synthetic oligonucleotide
  Antisense strand to SEQ ID NO: 2583824
auuuacagcggauucauga

SEQ ID NO: 2583826 - RNA, 19 nt, Artificial Sequence
  Description of Artificial Sequence: Synthetic oligonucleotide
  Sense strand starting at position 20 of SEQ ID NO: 1889188
augaauccgcuguaaauug

SEQ ID NO: 2583827 - RNA, 19 nt, Artificial Sequence
  Description of Artificial Sequence: Synthetic oligonucleotide
  Antisense strand to SEQ ID NO: 2583826
caauuuacagcggauucau

SEQ ID NO: 2583828 - RNA, 19 nt, Artificial Sequence
  Description of Artificial Sequence: Synthetic oligonucleotide
  Sense strand starting at position 384 of SEQ ID NO: 1889188
ugugaagauagaugucaca

SEQ ID NO: 2583829 - RNA, 19 nt, Artificial Sequence
  Description of Artificial Sequence: Synthetic oligonucleotide
  Antisense strand to SEQ ID NO: 2583828
ugugacaucuaucuucaca

SEQ ID NO: 2583830 - RNA, 19 nt, Artificial Sequence
  Description of Artificial Sequence: Synthetic oligonucleotide
  Sense strand starting at position 387 of SEQ ID NO: 1889188
gaagauagaugucacagaa

SEQ ID NO: 2583831 - RNA, 19 nt, Artificial Sequence
  Description of Artificial Sequence: Synthetic oligonucleotide
  Antisense strand to SEQ ID NO: 2583830
uucugugacaucuaucuuc

SEQ ID NO: 2583832 - RNA, 19 nt, Artificial Sequence
  Description of Artificial Sequence: Synthetic oligonucleotide
  Sense strand starting at position 536 of SEQ ID NO: 1889188
cucccuauuugaggacuau

SEQ ID NO: 2583833 - RNA, 19 nt, Artificial Sequence
  Description of Artificial Sequence: Synthetic oligonucleotide
  Antisense strand to SEQ ID NO: 2583832
auaguccucaaauagggag

SEQ ID NO: 2583834 - RNA, 19 nt, Artificial Sequence
  Description of Artificial Sequence: Synthetic oligonucleotide
  Sense strand starting at position 550 of SEQ ID NO: 1889188
acuaucauaccaggagcua

SEQ ID NO: 2583835 - RNA, 19 nt, Artificial Sequence
  Description of Artificial Sequence: Synthetic oligonucleotide
  Antisense strand to SEQ ID NO: 2583834
uagcuccugguaugauagu

SEQ ID NO: 2583836 - RNA, 19 nt, Artificial Sequence
  Description of Artificial Sequence: Synthetic oligonucleotide
  Sense strand starting at position 565 of SEQ ID NO: 1889188
gcuaaauggaagugagauc

SEQ ID NO: 2583837 - RNA, 19 nt, Artificial Sequence
  Description of Artificial Sequence: Synthetic oligonucleotide
  Antisense strand to SEQ ID NO: 2583836
gaucucacuuccauuuagc

SEQ ID NO: 2583838 - RNA, 19 nt, Artificial Sequence
  Description of Artificial Sequence: Synthetic oligonucleotide
  Sense strand starting at position 596 of SEQ ID NO: 1889188
guuugauguggccaccaca

SEQ ID NO: 2583839 - RNA, 19 nt, Artificial Sequence
  Description of Artificial Sequence: Synthetic oligonucleotide
  Antisense strand to SEQ ID NO: 2583838
ugugguggccacaucaaac

SEQ ID NO: 2583840 - RNA, 19 nt, Artificial Sequence
  Description of Artificial Sequence: Synthetic oligonucleotide
  Sense strand starting at position 864 of SEQ ID NO: 1889188
gcuugauaccuguaggaga

SEQ ID NO: 2583841 - RNA, 19 nt, Artificial Sequence
  Description of Artificial Sequence: Synthetic oligonucleotide
  Antisense strand to SEQ ID NO: 2583840
ucuccuacagguaucaagc

SEQ ID NO: 2583842 - RNA, 19 nt, Artificial Sequence
  Description of Artificial Sequence: Synthetic oligonucleotide
  Sense strand starting at position 1006 of SEQ ID NO: 1889188
acagaauuauuggcuucca

SEQ ID NO: 2583843 - RNA, 19 nt, Artificial Sequence
  Description of Artificial Sequence: Synthetic oligonucleotide
  Antisense strand to SEQ ID NO: 2583842
uggaagccaauaauucugu

SEQ ID NO: 2583844 - RNA, 19 nt, Artificial Sequence
  Description of Artificial Sequence: Synthetic oligonucleotide
  Sense strand starting at position 1337 of SEQ ID NO: 1889188
uccacuuagagcugugaga

SEQ ID NO: 2583845 - RNA, 19 nt, Artificial Sequence
  Description of Artificial Sequence: Synthetic oligonucleotide
  Antisense strand to SEQ ID NO: 2583844
ucucacagcucuaagugga

SEQ ID NO: 2583846 - RNA, 19 nt, Artificial Sequence
  Description of Artificial Sequence: Synthetic oligonucleotide
  Sense strand starting at position 1351 of SEQ ID NO: 1889188
ugagaauacugcuccaccu

SEQ ID NO: 2583847 - RNA, 19 nt, Artificial Sequence
  Description of Artificial Sequence: Synthetic oligonucleotide
  Antisense strand to SEQ ID NO: 2583846
agguggagcaguauucuca

SEQ ID NO: 2583848 - RNA, 19 nt, Artificial Sequence
  Description of Artificial Sequence: Synthetic oligonucleotide
  Sense strand starting at position 1382 of SEQ ID NO: 1889188
ugucaugguuccuccauuu

SEQ ID NO: 2583849 - RNA, 19 nt, Artificial Sequence
  Description of Artificial Sequence: Synthetic oligonucleotide
  Antisense strand to SEQ ID NO: 2583848
aaauggaggaaccaugaca

SEQ ID NO: 2583850 - RNA, 19 nt, Artificial Sequence
  Description of Artificial Sequence: Synthetic oligonucleotide
  Sense strand starting at position 1444 of SEQ ID NO: 1889188
gguuaagaaccuggccaua

SEQ ID NO: 2583851 - RNA, 19 nt, Artificial Sequence
  Description of Artificial Sequence: Synthetic oligonucleotide
  Antisense strand to SEQ ID NO: 2583850
uauggccagguucuuaacc

SEQ ID NO: 2583852 - RNA, 19 nt, Artificial Sequence
  Description of Artificial Sequence: Synthetic oligonucleotide
  Sense strand starting at position 1446 of SEQ ID NO: 1889188
uuaagaaccuggccauauu

SEQ ID NO: 2583853 - RNA, 19 nt, Artificial Sequence
  Description of Artificial Sequence: Synthetic oligonucleotide
  Antisense strand to SEQ ID NO: 2583852
aauauggccagguucuuaa

SEQ ID NO: 2583854 - RNA, 19 nt, Artificial Sequence
  Description of Artificial Sequence: Synthetic oligonucleotide
  Sense strand starting at position 1480 of SEQ ID NO: 1889188
ucuggagucacagguauga

SEQ ID NO: 2583855 - RNA, 19 nt, Artificial Sequence
  Description of Artificial Sequence: Synthetic oligonucleotide
  Antisense strand to SEQ ID NO: 2583854
ucauaccugugacuccaga

SEQ ID NO: 2583856 - RNA, 19 nt, Artificial Sequence
  Description of Artificial Sequence: Synthetic oligonucleotide
  Sense strand starting at position 1482 of SEQ ID NO: 1889188
uggagucacagguaugauu

SEQ ID NO: 2583857 - RNA, 19 nt, Artificial Sequence
  Description of Artificial Sequence: Synthetic oligonucleotide
  Antisense strand to SEQ ID NO: 2583856
aaucauaccugugacucca

SEQ ID NO: 2583858 - RNA, 19 nt, Artificial Sequence
  Description of Artificial Sequence: Synthetic oligonucleotide
  Sense strand starting at position 1484 of SEQ ID NO: 1889188
gagucacagguaugauucu

SEQ ID NO: 2583859 - RNA, 19 nt, Artificial Sequence
  Description of Artificial Sequence: Synthetic oligonucleotide
  Antisense strand to SEQ ID NO: 2583858
agaaucauaccugugacuc

SEQ ID NO: 2583860 - RNA, 19 nt, Artificial Sequence
  Description of Artificial Sequence: Synthetic oligonucleotide
  Sense strand starting at position 1705 of SEQ ID NO: 1889188
cacaguggguuauugcaua

SEQ ID NO: 2583861 - RNA, 19 nt, Artificial Sequence
  Description of Artificial Sequence: Synthetic oligonucleotide
  Antisense strand to SEQ ID NO: 2583860
uaugcaauaacccacugug

SEQ ID NO: 2583862 - RNA, 19 nt, Artificial Sequence
  Description of Artificial Sequence: Synthetic oligonucleotide
  Sense strand starting at position 1710 of SEQ ID NO: 1889188
uggguuauugcauacagca

SEQ ID NO: 2583863 - RNA, 19 nt, Artificial Sequence
  Description of Artificial Sequence: Synthetic oligonucleotide
  Antisense strand to SEQ ID NO: 2583862
ugcuguaugcaauaaccca

SEQ ID NO: 2583864 - RNA, 19 nt, Artificial Sequence
  Description of Artificial Sequence: Synthetic oligonucleotide
  Sense strand starting at position 1993 of SEQ ID NO: 1889188
ucaugauccuaggagagaa

SEQ ID NO: 2583865 - RNA, 19 nt, Artificial Sequence
  Description of Artificial Sequence: Synthetic oligonucleotide
  Antisense strand to SEQ ID NO: 2583864
uucucuccuaggaucauga

SEQ ID NO: 2583866 - RNA, 19 nt, Artificial Sequence
  Description of Artificial Sequence: Synthetic oligonucleotide
  Sense strand starting at position 2015 of SEQ ID NO: 1889188
acgugagcuagccagaaga

SEQ ID NO: 2583867 - RNA, 19 nt, Artificial Sequence
  Description of Artificial Sequence: Synthetic oligonucleotide
  Antisense strand to SEQ ID NO: 2583866
ucuucuggcuagcucacgu

SEQ ID NO: 2583868 - RNA, 19 nt, Artificial Sequence
  Description of Artificial Sequence: Synthetic oligonucleotide
  Sense strand starting at position 2017 of SEQ ID NO: 1889188
gugagcuagccagaagaua

SEQ ID NO: 2583869 - RNA, 19 nt, Artificial Sequence
  Description of Artificial Sequence: Synthetic oligonucleotide
  Antisense strand to SEQ ID NO: 2583868
uaucuucuggcuagcucac

SEQ ID NO: 2583870 - RNA, 19 nt, Artificial Sequence
  Description of Artificial Sequence: Synthetic oligonucleotide
  Sense strand starting at position 2207 of SEQ ID NO: 1889188
agucuuccugcagaaccau

SEQ ID NO: 2583871 - RNA, 19 nt, Artificial Sequence
  Description of Artificial Sequence: Synthetic oligonucleotide
  Antisense strand to SEQ ID NO: 2583870
augguucugcaggaagacu

SEQ ID NO: 2583872 - RNA, 19 nt, Artificial Sequence
  Description of Artificial Sequence: Synthetic oligonucleotide
  Sense strand starting at position 2262 of SEQ ID NO: 1889188
aaauuauugugagucuuug

SEQ ID NO: 2583873 - RNA, 19 nt, Artificial Sequence
  Description of Artificial Sequence: Synthetic oligonucleotide
  Antisense strand to SEQ ID NO: 2583872
caaagacucacaauaauuu

SEQ ID NO: 2583874 - RNA, 19 nt, Artificial Sequence
  Description of Artificial Sequence: Synthetic oligonucleotide
  Sense strand starting at position 2455 of SEQ ID NO: 1889188
gccuguguggcucugcuua

SEQ ID NO: 2583875 - RNA, 19 nt, Artificial Sequence
  Description of Artificial Sequence: Synthetic oligonucleotide
  Antisense strand to SEQ ID NO: 2583874
uaagcagagccacacaggc

SEQ ID NO: 2583876 - RNA, 19 nt, Artificial Sequence
  Description of Artificial Sequence: Synthetic oligonucleotide
  Sense strand starting at position 2636 of SEQ ID NO: 1889188
ucaguauuccauuguccag

SEQ ID NO: 2583877 - RNA, 19 nt, Artificial Sequence
  Description of Artificial Sequence: Synthetic oligonucleotide
  Antisense strand to SEQ ID NO: 2583876
cuggacaauggaauacuga

SEQ ID NO: 2583878 - RNA, 19 nt, Artificial Sequence
  Description of Artificial Sequence: Synthetic oligonucleotide
  Sense strand starting at position 2654 of SEQ ID NO: 1889188
guggucaucccaggaagaa

SEQ ID NO: 2583879 - RNA, 19 nt, Artificial Sequence
  Description of Artificial Sequence: Synthetic oligonucleotide
  Antisense strand to SEQ ID NO: 2583878
uucuuccugggaugaccac

SEQ ID NO: 2583880 - RNA, 19 nt, Artificial Sequence
  Description of Artificial Sequence: Synthetic oligonucleotide
  Sense strand starting at position 2940 of SEQ ID NO: 1889188
gcaaguaguccacacuaug

SEQ ID NO: 2583881 - RNA, 19 nt, Artificial Sequence
  Description of Artificial Sequence: Synthetic oligonucleotide
  Antisense strand to SEQ ID NO: 2583880
cauaguguggacuacuugc

SEQ ID NO: 2583882 - RNA, 19 nt, Artificial Sequence
  Description of Artificial Sequence: Synthetic oligonucleotide
  Sense strand starting at position 2972 of SEQ ID NO: 1889188
gugggaguacuccaaugug

SEQ ID NO: 2583883 - RNA, 19 nt, Artificial Sequence
  Description of Artificial Sequence: Synthetic oligonucleotide
  Antisense strand to SEQ ID NO: 2583882
cacauuggaguacucccac

SEQ ID NO: 2583884 - RNA, 19 nt, Artificial Sequence
  Description of Artificial Sequence: Synthetic oligonucleotide
  Sense strand starting at position 2981 of SEQ ID NO: 1889188
cuccaaugugcagagaaca

SEQ ID NO: 2583885 - RNA, 19 nt, Artificial Sequence
  Description of Artificial Sequence: Synthetic oligonucleotide
  Antisense strand to SEQ ID NO: 2583884
uguucucugcacauuggag

SEQ ID NO: 2583886 - RNA, 19 nt, Artificial Sequence
  Description of Artificial Sequence: Synthetic oligonucleotide
  Sense strand starting at position 3063 of SEQ ID NO: 1889188
aaaugaaagugagaccuau

SEQ ID NO: 2583887 - RNA, 19 nt, Artificial Sequence
  Description of Artificial Sequence: Synthetic oligonucleotide
  Antisense strand to SEQ ID NO: 2583886
auaggucucacuuucauuu

SEQ ID NO: 2583888 - RNA, 19 nt, Artificial Sequence
  Description of Artificial Sequence: Synthetic oligonucleotide
  Sense strand starting at position 3168 of SEQ ID NO: 1889188
ggcucaacaucuucccaga

SEQ ID NO: 2583889 - RNA, 19 nt, Artificial Sequence
  Description of Artificial Sequence: Synthetic oligonucleotide
  Antisense strand to SEQ ID NO: 2583888
ucugggaagauguugagcc

SEQ ID NO: 2583890 - RNA, 19 nt, Artificial Sequence
  Description of Artificial Sequence: Synthetic oligonucleotide
  Sense strand starting at position 3299 of SEQ ID NO: 1889188
ggaaacucuugcucuccaa

SEQ ID NO: 2583891 - RNA, 19 nt, Artificial Sequence
  Description of Artificial Sequence: Synthetic oligonucleotide
  Antisense strand to SEQ ID NO: 2583890
uuggagagcaagaguuucc

SEQ ID NO: 2583892 - RNA, 19 nt, Artificial Sequence
  Description of Artificial Sequence: Synthetic oligonucleotide
  Sense strand starting at position 3334 of SEQ ID NO: 1889188
gcaugauuccuguaggaag

SEQ ID NO: 2583893 - RNA, 19 nt, Artificial Sequence
  Description of Artificial Sequence: Synthetic oligonucleotide
  Antisense strand to SEQ ID NO: 2583892
cuuccuacaggaaucaugc

SEQ ID NO: 2583894 - RNA, 19 nt, Artificial Sequence
  Description of Artificial Sequence: Synthetic oligonucleotide
  Sense strand starting at position 3575 of SEQ ID NO: 1889188
uuguuugcacuuugaagga

SEQ ID NO: 2583895 - RNA, 19 nt, Artificial Sequence
  Description of Artificial Sequence: Synthetic oligonucleotide
  Antisense strand to SEQ ID NO: 2583894
uccuucaaagugcaaacaa

SEQ ID NO: 2583896 - RNA, 19 nt, Artificial Sequence
  Description of Artificial Sequence: Synthetic oligonucleotide
  Sense strand starting at position 3621 of SEQ ID NO: 1889188
uugaauauugcuuagauuc

SEQ ID NO: 2583897 - RNA, 19 nt, Artificial Sequence
  Description of Artificial Sequence: Synthetic oligonucleotide
  Antisense strand to SEQ ID NO: 2583896
gaaucuaagcaauauucaa

SEQ ID NO: 2583898 - RNA, 19 nt, Artificial Sequence
  Description of Artificial Sequence: Synthetic oligonucleotide
  Sense strand starting at position 3806 of SEQ ID NO: 1889188
caguuugagguuugagaac

SEQ ID NO: 2583899 - RNA, 19 nt, Artificial Sequence
  Description of Artificial Sequence: Synthetic oligonucleotide
  Antisense strand to SEQ ID NO: 2583898
guucucaaaccucaaacug

SEQ ID NO: 2583900 - RNA, 19 nt, Artificial Sequence
  Description of Artificial Sequence: Synthetic oligonucleotide
  Sense strand starting at position 383 of SEQ ID NO: 1889189
ugugaagauagaugucaca

SEQ ID NO: 2583901 - RNA, 19 nt, Artificial Sequence
  Description of Artificial Sequence: Synthetic oligonucleotide
  Antisense strand to SEQ ID NO: 2583900
ugugacaucuaucuucaca

SEQ ID NO: 2583902 - RNA, 19 nt, Artificial Sequence
  Description of Artificial Sequence: Synthetic oligonucleotide
  Sense strand starting at position 386 of SEQ ID NO: 1889189
gaagauagaugucacagaa

SEQ ID NO: 2583903 - RNA, 19 nt, Artificial Sequence
  Description of Artificial Sequence: Synthetic oligonucleotide
  Antisense strand to SEQ ID NO: 2583902
uucugugacaucuaucuuc

SEQ ID NO: 2583904 - RNA, 19 nt, Artificial Sequence
  Description of Artificial Sequence: Synthetic oligonucleotide
  Sense strand starting at position 549 of SEQ ID NO: 1889189
acuaucauaccaggagcua

SEQ ID NO: 2583905 - RNA, 19 nt, Artificial Sequence
  Description of Artificial Sequence: Synthetic oligonucleotide
  Antisense strand to SEQ ID NO: 2583904
uagcuccugguaugauagu

SEQ ID NO: 2583906 - RNA, 19 nt, Artificial Sequence
  Description of Artificial Sequence: Synthetic oligonucleotide
  Sense strand starting at position 564 of SEQ ID NO: 1889189
gcuaaauggaagugagauc

SEQ ID NO: 2583907 - RNA, 19 nt, Artificial Sequence
  Description of Artificial Sequence: Synthetic oligonucleotide
  Antisense strand to SEQ ID NO: 2583906
gaucucacuuccauuuagc

SEQ ID NO: 2583908 - RNA, 19 nt, Artificial Sequence
  Description of Artificial Sequence: Synthetic oligonucleotide
  Sense strand starting at position 595 of SEQ ID NO: 1889189
guuugauguggccaccaca

SEQ ID NO: 2583909 - RNA, 19 nt, Artificial Sequence
  Description of Artificial Sequence: Synthetic oligonucleotide
  Antisense strand to SEQ ID NO: 2583908
ugugguggccacaucaaac

SEQ ID NO: 2583910 - RNA, 19 nt, Artificial Sequence
  Description of Artificial Sequence: Synthetic oligonucleotide
  Sense strand starting at position 863 of SEQ ID NO: 1889189
gcuugauaccuguaggaga

SEQ ID NO: 2583911 - RNA, 19 nt, Artificial Sequence
  Description of Artificial Sequence: Synthetic oligonucleotide
  Antisense strand to SEQ ID NO: 2583910
ucuccuacagguaucaagc

SEQ ID NO: 2583912 - RNA, 19 nt, Artificial Sequence
  Description of Artificial Sequence: Synthetic oligonucleotide
  Sense strand starting at position 1005 of SEQ ID NO: 1889189
acagaauuauuggcuucca

SEQ ID NO: 2583913 - RNA, 19 nt, Artificial Sequence
  Description of Artificial Sequence: Synthetic oligonucleotide
  Antisense strand to SEQ ID NO: 2583912
uggaagccaauaauucugu

SEQ ID NO: 2583914 - RNA, 19 nt, Artificial Sequence
  Description of Artificial Sequence: Synthetic oligonucleotide
  Sense strand starting at position 1350 of SEQ ID NO: 1889189
ugagaauacugcuccaccu

SEQ ID NO: 2583915 - RNA, 19 nt, Artificial Sequence
  Description of Artificial Sequence: Synthetic oligonucleotide
  Antisense strand to SEQ ID NO: 2583914
agguggagcaguauucuca

SEQ ID NO: 2583916 - RNA, 19 nt, Artificial Sequence
  Description of Artificial Sequence: Synthetic oligonucleotide
  Sense strand starting at position 1443 of SEQ ID NO: 1889189
gguuaagaaccuggccaua

SEQ ID NO: 2583917 - RNA, 19 nt, Artificial Sequence
  Description of Artificial Sequence: Synthetic oligonucleotide
  Antisense strand to SEQ ID NO: 2583916
uauggccagguucuuaacc

SEQ ID NO: 2583918 - RNA, 19 nt, Artificial Sequence
  Description of Artificial Sequence: Synthetic oligonucleotide
  Sense strand starting at position 1445 of SEQ ID NO: 1889189
uuaagaaccuggccauauu

SEQ ID NO: 2583919 - RNA, 19 nt, Artificial Sequence
  Description of Artificial Sequence: Synthetic oligonucleotide
  Antisense strand to SEQ ID NO: 2583918
aauauggccagguucuuaa

SEQ ID NO: 2583920 - RNA, 19 nt, Artificial Sequence
  Description of Artificial Sequence: Synthetic oligonucleotide
  Sense strand starting at position 1479 of SEQ ID NO: 1889189
ucuggagucacagguauga

SEQ ID NO: 2583921 - RNA, 19 nt, Artificial Sequence
  Description of Artificial Sequence: Synthetic oligonucleotide
  Antisense strand to SEQ ID NO: 2583920
ucauaccugugacuccaga

SEQ ID NO: 2583922 - RNA, 19 nt, Artificial Sequence
  Description of Artificial Sequence: Synthetic oligonucleotide
  Sense strand starting at position 1481 of SEQ ID NO: 1889189
uggagucacagguaugauu

SEQ ID NO: 2583923 - RNA, 19 nt, Artificial Sequence
  Description of Artificial Sequence: Synthetic oligonucleotide
  Antisense strand to SEQ ID NO: 2583922
aaucauaccugugacucca

SEQ ID NO: 2583924 - RNA, 19 nt, Artificial Sequence
  Description of Artificial Sequence: Synthetic oligonucleotide
  Sense strand starting at position 1483 of SEQ ID NO: 1889189
gagucacagguaugauucu

SEQ ID NO: 2583925 - RNA, 19 nt, Artificial Sequence
  Description of Artificial Sequence: Synthetic oligonucleotide
  Antisense strand to SEQ ID NO: 2583924
agaaucauaccugugacuc

SEQ ID NO: 2583926 - RNA, 19 nt, Artificial Sequence
  Description of Artificial Sequence: Synthetic oligonucleotide
  Sense strand starting at position 1648 of SEQ ID NO: 1889189
ggaacagaucacggguaca

SEQ ID NO: 2583927 - RNA, 19 nt, Artificial Sequence
  Description of Artificial Sequence: Synthetic oligonucleotide
  Antisense strand to SEQ ID NO: 2583926
uguacccgugaucuguucc

SEQ ID NO: 2583928 - RNA, 19 nt, Artificial Sequence
  Description of Artificial Sequence: Synthetic oligonucleotide
  Sense strand starting at position 1704 of SEQ ID NO: 1889189
cacaguggguuauugcaua

SEQ ID NO: 2583929 - RNA, 19 nt, Artificial Sequence
  Description of Artificial Sequence: Synthetic oligonucleotide
  Antisense strand to SEQ ID NO: 2583928
uaugcaauaacccacugug

SEQ ID NO: 2583930 - RNA, 19 nt, Artificial Sequence
  Description of Artificial Sequence: Synthetic oligonucleotide
  Sense strand starting at position 1709 of SEQ ID NO: 1889189
uggguuauugcauacagca

SEQ ID NO: 2583931 - RNA, 19 nt, Artificial Sequence
  Description of Artificial Sequence: Synthetic oligonucleotide
  Antisense strand to SEQ ID NO: 2583930
ugcuguaugcaauaaccca

SEQ ID NO: 2583932 - RNA, 19 nt, Artificial Sequence
  Description of Artificial Sequence: Synthetic oligonucleotide
  Sense strand starting at position 1893 of SEQ ID NO: 1889189
gccacaauucccugaggcu

SEQ ID NO: 2583933 - RNA, 19 nt, Artificial Sequence
  Description of Artificial Sequence: Synthetic oligonucleotide
  Antisense strand to SEQ ID NO: 2583932
agccucagggaauuguggc

SEQ ID NO: 2583934 - RNA, 19 nt, Artificial Sequence
  Description of Artificial Sequence: Synthetic oligonucleotide
  Sense strand starting at position 1894 of SEQ ID NO: 1889189
ccacaauucccugaggcuu

SEQ ID NO: 2583935 - RNA, 19 nt, Artificial Sequence
  Description of Artificial Sequence: Synthetic oligonucleotide
  Antisense strand to SEQ ID NO: 2583934
aagccucagggaauugugg

SEQ ID NO: 2583936 - RNA, 19 nt, Artificial Sequence
  Description of Artificial Sequence: Synthetic oligonucleotide
  Sense strand starting at position 1948 of SEQ ID NO: 1889189
caaggaaucuugccugucu

SEQ ID NO: 2583937 - RNA, 19 nt, Artificial Sequence
  Description of Artificial Sequence: Synthetic oligonucleotide
  Antisense strand to SEQ ID NO: 2583936
agacaggcaagauuccuug

SEQ ID NO: 2583938 - RNA, 19 nt, Artificial Sequence
  Description of Artificial Sequence: Synthetic oligonucleotide
  Sense strand starting at position 1949 of SEQ ID NO: 1889189
aaggaaucuugccugucuu

SEQ ID NO: 2583939 - RNA, 19 nt, Artificial Sequence
  Description of Artificial Sequence: Synthetic oligonucleotide
  Antisense strand to SEQ ID NO: 2583938
aagacaggcaagauuccuu

SEQ ID NO: 2583940 - RNA, 19 nt, Artificial Sequence
  Description of Artificial Sequence: Synthetic oligonucleotide
  Sense strand starting at position 1963 of SEQ ID NO: 1889189
gucuucuuugugggauaca

SEQ ID NO: 2583941 - RNA, 19 nt, Artificial Sequence
  Description of Artificial Sequence: Synthetic oligonucleotide
  Antisense strand to SEQ ID NO: 2583940
uguaucccacaaagaagac

SEQ ID NO: 2583942 - RNA, 19 nt, Artificial Sequence
  Description of Artificial Sequence: Synthetic oligonucleotide
  Sense strand starting at position 1992 of SEQ ID NO: 1889189
ucaugauccuaggagagaa

SEQ ID NO: 2583943 - RNA, 19 nt, Artificial Sequence
  Description of Artificial Sequence: Synthetic oligonucleotide
  Antisense strand to SEQ ID NO: 2583942
uucucuccuaggaucauga

SEQ ID NO: 2583944 - RNA, 19 nt, Artificial Sequence
  Description of Artificial Sequence: Synthetic oligonucleotide
  Sense strand starting at position 2014 of SEQ ID NO: 1889189
acgugagcuagccagaaga

SEQ ID NO: 2583945 - RNA, 19 nt, Artificial Sequence
  Description of Artificial Sequence: Synthetic oligonucleotide
  Antisense strand to SEQ ID NO: 2583944
ucuucuggcuagcucacgu

SEQ ID NO: 2583946 - RNA, 19 nt, Artificial Sequence
  Description of Artificial Sequence: Synthetic oligonucleotide
  Sense strand starting at position 2016 of SEQ ID NO: 1889189
gugagcuagccagaagaua

SEQ ID NO: 2583947 - RNA, 19 nt, Artificial Sequence
  Description of Artificial Sequence: Synthetic oligonucleotide
  Antisense strand to SEQ ID NO: 2583946
uaucuucuggcuagcucac

SEQ ID NO: 2583948 - RNA, 19 nt, Artificial Sequence
  Description of Artificial Sequence: Synthetic oligonucleotide
  Sense strand starting at position 2206 of SEQ ID NO: 1889189
agucuuccugcagaaccau

SEQ ID NO: 2583949 - RNA, 19 nt, Artificial Sequence
  Description of Artificial Sequence: Synthetic oligonucleotide
  Antisense strand to SEQ ID NO: 2583948
augguucugcaggaagacu

SEQ ID NO: 2583950 - RNA, 19 nt, Artificial Sequence
  Description of Artificial Sequence: Synthetic oligonucleotide
  Sense strand starting at position 2261 of SEQ ID NO: 1889189
aaauuauugugagucuuug

SEQ ID NO: 2583951 - RNA, 19 nt, Artificial Sequence
  Description of Artificial Sequence: Synthetic oligonucleotide
  Antisense strand to SEQ ID NO: 2583950
caaagacucacaauaauuu

SEQ ID NO: 2583952 - RNA, 19 nt, Artificial Sequence
  Description of Artificial Sequence: Synthetic oligonucleotide
  Sense strand starting at position 2452 of SEQ ID NO: 1889189
gccuguguggcucugcuua

SEQ ID NO: 2583953 - RNA, 19 nt, Artificial Sequence
  Description of Artificial Sequence: Synthetic oligonucleotide
  Antisense strand to SEQ ID NO: 2583952
uaagcagagccacacaggc

SEQ ID NO: 2583954 - RNA, 19 nt, Artificial Sequence
  Description of Artificial Sequence: Synthetic oligonucleotide
  Sense strand starting at position 2581 of SEQ ID NO: 1889189
gcugcucuucuagaaagaa

SEQ ID NO: 2583955 - RNA, 19 nt, Artificial Sequence
  Description of Artificial Sequence: Synthetic oligonucleotide
  Antisense strand to SEQ ID NO: 2583954
uucuuucuagaagagcagc

SEQ ID NO: 2583956 - RNA, 19 nt, Artificial Sequence
  Description of Artificial Sequence: Synthetic oligonucleotide
  Sense strand starting at position 2633 of SEQ ID NO: 1889189
ucaguauuccauuguccag

SEQ ID NO: 2583957 - RNA, 19 nt, Artificial Sequence
  Description of Artificial Sequence: Synthetic oligonucleotide
  Antisense strand to SEQ ID NO: 2583956
cuggacaauggaauacuga

SEQ ID NO: 2583958 - RNA, 19 nt, Artificial Sequence
  Description of Artificial Sequence: Synthetic oligonucleotide
  Sense strand starting at position 2651 of SEQ ID NO: 1889189
guggucaucccaggaagaa

SEQ ID NO: 2583959 - RNA, 19 nt, Artificial Sequence
  Description of Artificial Sequence: Synthetic oligonucleotide
  Antisense strand to SEQ ID NO: 2583958
uucuuccugggaugaccac

SEQ ID NO: 2583960 - RNA, 19 nt, Artificial Sequence
  Description of Artificial Sequence: Synthetic oligonucleotide
  Sense strand starting at position 2937 of SEQ ID NO: 1889189
gcaaguaguccacacuaug

SEQ ID NO: 2583961 - RNA, 19 nt, Artificial Sequence
  Description of Artificial Sequence: Synthetic oligonucleotide
  Antisense strand to SEQ ID NO: 2583960
cauaguguggacuacuugc

SEQ ID NO: 2583962 - RNA, 19 nt, Artificial Sequence
  Description of Artificial Sequence: Synthetic oligonucleotide
  Sense strand starting at position 2947 of SEQ ID NO: 1889189
cacacuauggccugauguu

SEQ ID NO: 2583963 - RNA, 19 nt, Artificial Sequence
  Description of Artificial Sequence: Synthetic oligonucleotide
  Antisense strand to SEQ ID NO: 2583962
aacaucaggccauagugug

SEQ ID NO: 2583964 - RNA, 19 nt, Artificial Sequence
  Description of Artificial Sequence: Synthetic oligonucleotide
  Sense strand starting at position 2959 of SEQ ID NO: 1889189
ugauguucaggugggagua

SEQ ID NO: 2583965 - RNA, 19 nt, Artificial Sequence
  Description of Artificial Sequence: Synthetic oligonucleotide
  Antisense strand to SEQ ID NO: 2583964
uacucccaccugaacauca

SEQ ID NO: 2583966 - RNA, 19 nt, Artificial Sequence
  Description of Artificial Sequence: Synthetic oligonucleotide
  Sense strand starting at position 2978 of SEQ ID NO: 1889189
cuccaaugugcagagaaca

SEQ ID NO: 2583967 - RNA, 19 nt, Artificial Sequence
  Description of Artificial Sequence: Synthetic oligonucleotide
  Antisense strand to SEQ ID NO: 2583966
uguucucugcacauuggag

SEQ ID NO: 2583968 - RNA, 19 nt, Artificial Sequence
  Description of Artificial Sequence: Synthetic oligonucleotide
  Sense strand starting at position 3060 of SEQ ID NO: 1889189
aaaugaaagugagaccuau

SEQ ID NO: 2583969 - RNA, 19 nt, Artificial Sequence
  Description of Artificial Sequence: Synthetic oligonucleotide
  Antisense strand to SEQ ID NO: 2583968
auaggucucacuuucauuu

SEQ ID NO: 2583970 - RNA, 19 nt, Artificial Sequence
  Description of Artificial Sequence: Synthetic oligonucleotide
  Sense strand starting at position 3091 of SEQ ID NO: 1889189
ggaugugaccuccacacuu

SEQ ID NO: 2583971 - RNA, 19 nt, Artificial Sequence
  Description of Artificial Sequence: Synthetic oligonucleotide
  Antisense strand to SEQ ID NO: 2583970
aaguguggaggucacaucc

SEQ ID NO: 2583972 - RNA, 19 nt, Artificial Sequence
  Description of Artificial Sequence: Synthetic oligonucleotide
  Sense strand starting at position 3165 of SEQ ID NO: 1889189
ggcucaacaucuucccaga

SEQ ID NO: 2583973 - RNA, 19 nt, Artificial Sequence
  Description of Artificial Sequence: Synthetic oligonucleotide
  Antisense strand to SEQ ID NO: 2583972
ucugggaagauguugagcc

SEQ ID NO: 2583974 - RNA, 19 nt, Artificial Sequence
  Description of Artificial Sequence: Synthetic oligonucleotide
  Sense strand starting at position 3331 of SEQ ID NO: 1889189
gcaugauuccuguaggaag

SEQ ID NO: 2583975 - RNA, 19 nt, Artificial Sequence
  Description of Artificial Sequence: Synthetic oligonucleotide
  Antisense strand to SEQ ID NO: 2583974
cuuccuacaggaaucaugc

SEQ ID NO: 2583976 - RNA, 19 nt, Artificial Sequence
  Description of Artificial Sequence: Synthetic oligonucleotide
  Sense strand starting at position 3618 of SEQ ID NO: 1889189
uugaauauugcuuagauuc

SEQ ID NO: 2583977 - RNA, 19 nt, Artificial Sequence
  Description of Artificial Sequence: Synthetic oligonucleotide
  Antisense strand to SEQ ID NO: 2583976
gaaucuaagcaauauucaa

SEQ ID NO: 2583978 - RNA, 19 nt, Artificial Sequence
  Description of Artificial Sequence: Synthetic oligonucleotide
  Sense strand starting at position 3752 of SEQ ID NO: 1889189
acagauggccucugagaua

SEQ ID NO: 2583979 - RNA, 19 nt, Artificial Sequence
  Description of Artificial Sequence: Synthetic oligonucleotide
  Antisense strand to SEQ ID NO: 2583978
uaucucagaggccaucugu

SEQ ID NO: 2583980 - RNA, 19 nt, Artificial Sequence
  Description of Artificial Sequence: Synthetic oligonucleotide
  Sense strand starting at position 10 of SEQ ID NO: 1889190
uggguuccauguucuuuau

SEQ ID NO: 2583981 - RNA, 19 nt, Artificial Sequence
  Description of Artificial Sequence: Synthetic oligonucleotide
  Antisense strand to SEQ ID NO: 2583980
auaaagaacauggaaccca

SEQ ID NO: 2583982 - RNA, 19 nt, Artificial Sequence
  Description of Artificial Sequence: Synthetic oligonucleotide
  Sense strand starting at position 37 of SEQ ID NO: 1889190
agaucaugaauccgcugua

SEQ ID NO: 2583983 - RNA, 19 nt, Artificial Sequence
  Description of Artificial Sequence: Synthetic oligonucleotide
  Antisense strand to SEQ ID NO: 2583982
uacagcggauucaugaucu

SEQ ID NO: 2583984 - RNA, 19 nt, Artificial Sequence
  Description of Artificial Sequence: Synthetic oligonucleotide
  Sense strand starting at position 38 of SEQ ID NO: 1889190
gaucaugaauccgcuguaa

SEQ ID NO: 2583985 - RNA, 19 nt, Artificial Sequence
  Description of Artificial Sequence: Synthetic oligonucleotide
  Antisense strand to SEQ ID NO: 2583984
uuacagcggauucaugauc

SEQ ID NO: 2583986 - RNA, 19 nt, Artificial Sequence
  Description of Artificial Sequence: Synthetic oligonucleotide
  Sense strand starting at position 40 of SEQ ID NO: 1889190
ucaugaauccgcuguaaau

SEQ ID NO: 2583987 - RNA, 19 nt, Artificial Sequence
  Description of Artificial Sequence: Synthetic oligonucleotide
  Antisense strand to SEQ ID NO: 2583986
auuuacagcggauucauga

SEQ ID NO: 2583988 - RNA, 19 nt, Artificial Sequence
  Description of Artificial Sequence: Synthetic oligonucleotide
  Sense strand starting at position 42 of SEQ ID NO: 1889190
augaauccgcuguaaauug

SEQ ID NO: 2583989 - RNA, 19 nt, Artificial Sequence
  Description of Artificial Sequence: Synthetic oligonucleotide
  Antisense strand to SEQ ID NO: 2583988
caauuuacagcggauucau

SEQ ID NO: 2583990 - RNA, 19 nt, Artificial Sequence
  Description of Artificial Sequence: Synthetic oligonucleotide
  Sense strand starting at position 406 of SEQ ID NO: 1889190
ugugaagauagaugucaca

SEQ ID NO: 2583991 - RNA, 19 nt, Artificial Sequence
  Description of Artificial Sequence: Synthetic oligonucleotide
  Antisense strand to SEQ ID NO: 2583990
ugugacaucuaucuucaca

SEQ ID NO: 2583992 - RNA, 19 nt, Artificial Sequence
  Description of Artificial Sequence: Synthetic oligonucleotide
  Sense strand starting at position 409 of SEQ ID NO: 1889190
gaagauagaugucacagaa

SEQ ID NO: 2583993 - RNA, 19 nt, Artificial Sequence
  Description of Artificial Sequence: Synthetic oligonucleotide
  Antisense strand to SEQ ID NO: 2583992
uucugugacaucuaucuuc

SEQ ID NO: 2583994 - RNA, 19 nt, Artificial Sequence
  Description of Artificial Sequence: Synthetic oligonucleotide
  Sense strand starting at position 572 of SEQ ID NO: 1889190
acuaucauaccaggagcua

SEQ ID NO: 2583995 - RNA, 19 nt, Artificial Sequence
  Description of Artificial Sequence: Synthetic oligonucleotide
  Antisense strand to SEQ ID NO: 2583994
uagcuccugguaugauagu

SEQ ID NO: 2583996 - RNA, 19 nt, Artificial Sequence
  Description of Artificial Sequence: Synthetic oligonucleotide
  Sense strand starting at position 587 of SEQ ID NO: 1889190
gcuaaauggaagugagauc

SEQ ID NO: 2583997 - RNA, 19 nt, Artificial Sequence
  Description of Artificial Sequence: Synthetic oligonucleotide
  Antisense strand to SEQ ID NO: 2583996
gaucucacuuccauuuagc

SEQ ID NO: 2583998 - RNA, 19 nt, Artificial Sequence
  Description of Artificial Sequence: Synthetic oligonucleotide
  Sense strand starting at position 618 of SEQ ID NO: 1889190
guuugauguggccaccaca

SEQ ID NO: 2583999 - RNA, 19 nt, Artificial Sequence
  Description of Artificial Sequence: Synthetic oligonucleotide
  Antisense strand to SEQ ID NO: 2583998
ugugguggccacaucaaac

SEQ ID NO: 2584000 - RNA, 19 nt, Artificial Sequence
  Description of Artificial Sequence: Synthetic oligonucleotide
  Sense strand starting at position 886 of SEQ ID NO: 1889190
gcuugauaccuguaggaga

SEQ ID NO: 2584001 - RNA, 19 nt, Artificial Sequence
  Description of Artificial Sequence: Synthetic oligonucleotide
  Antisense strand to SEQ ID NO: 2584000
ucuccuacagguaucaagc

SEQ ID NO: 2584002 - RNA, 19 nt, Artificial Sequence
  Description of Artificial Sequence: Synthetic oligonucleotide
  Sense strand starting at position 1028 of SEQ ID NO: 1889190
acagaauuauuggcuucca

SEQ ID NO: 2584003 - RNA, 19 nt, Artificial Sequence
  Description of Artificial Sequence: Synthetic oligonucleotide
  Antisense strand to SEQ ID NO: 2584002
uggaagccaauaauucugu

SEQ ID NO: 2584004 - RNA, 19 nt, Artificial Sequence
  Description of Artificial Sequence: Synthetic oligonucleotide
  Sense strand starting at position 1359 of SEQ ID NO: 1889190
uccacuuagagcugugaga

SEQ ID NO: 2584005 - RNA, 19 nt, Artificial Sequence
  Description of Artificial Sequence: Synthetic oligonucleotide
  Antisense strand to SEQ ID NO: 2584004
ucucacagcucuaagugga

SEQ ID NO: 2584006 - RNA, 19 nt, Artificial Sequence
  Description of Artificial Sequence: Synthetic oligonucleotide
  Sense strand starting at position 1373 of SEQ ID NO: 1889190
ugagaauacugcuccaccu

SEQ ID NO: 2584007 - RNA, 19 nt, Artificial Sequence
  Description of Artificial Sequence: Synthetic oligonucleotide
  Antisense strand to SEQ ID NO: 2584006
agguggagcaguauucuca

SEQ ID NO: 2584008 - RNA, 19 nt, Artificial Sequence
  Description of Artificial Sequence: Synthetic oligonucleotide
  Sense strand starting at position 1404 of SEQ ID NO: 1889190
ugucaugguuccuccauuu

SEQ ID NO: 2584009 - RNA, 19 nt, Artificial Sequence
  Description of Artificial Sequence: Synthetic oligonucleotide
  Antisense strand to SEQ ID NO: 2584008
aaauggaggaaccaugaca

SEQ ID NO: 2584010 - RNA, 19 nt, Artificial Sequence
  Description of Artificial Sequence: Synthetic oligonucleotide
  Sense strand starting at position 1466 of SEQ ID NO: 1889190
gguuaagaaccuggccaua

SEQ ID NO: 2584011 - RNA, 19 nt, Artificial Sequence
  Description of Artificial Sequence: Synthetic oligonucleotide
  Antisense strand to SEQ ID NO: 2584010
uauggccagguucuuaacc

SEQ ID NO: 2584012 - RNA, 19 nt, Artificial Sequence
  Description of Artificial Sequence: Synthetic oligonucleotide
  Sense strand starting at position 1468 of SEQ ID NO: 1889190
uuaagaaccuggccauauu

SEQ ID NO: 2584013 - RNA, 19 nt, Artificial Sequence
  Description of Artificial Sequence: Synthetic oligonucleotide
  Antisense strand to SEQ ID NO: 2584012
aauauggccagguucuuaa

SEQ ID NO: 2584014 - RNA, 19 nt, Artificial Sequence
  Description of Artificial Sequence: Synthetic oligonucleotide
  Sense strand starting at position 1502 of SEQ ID NO: 1889190
ucuggagucacagguauga

SEQ ID NO: 2584015 - RNA, 19 nt, Artificial Sequence
  Description of Artificial Sequence: Synthetic oligonucleotide
  Antisense strand to SEQ ID NO: 2584014
ucauaccugugacuccaga

SEQ ID NO: 2584016 - RNA, 19 nt, Artificial Sequence
  Description of Artificial Sequence: Synthetic oligonucleotide
  Sense strand starting at position 1504 of SEQ ID NO: 1889190
uggagucacagguaugauu

SEQ ID NO: 2584017 - RNA, 19 nt, Artificial Sequence
  Description of Artificial Sequence: Synthetic oligonucleotide
  Antisense strand to SEQ ID NO: 2584016
aaucauaccugugacucca

SEQ ID NO: 2584018 - RNA, 19 nt, Artificial Sequence
  Description of Artificial Sequence: Synthetic oligonucleotide
  Sense strand starting at position 1506 of SEQ ID NO: 1889190
gagucacagguaugauucu

SEQ ID NO: 2584019 - RNA, 19 nt, Artificial Sequence
  Description of Artificial Sequence: Synthetic oligonucleotide
  Antisense strand to SEQ ID NO: 2584018
agaaucauaccugugacuc

SEQ ID NO: 2584020 - RNA, 19 nt, Artificial Sequence
  Description of Artificial Sequence: Synthetic oligonucleotide
  Sense strand starting at position 1727 of SEQ ID NO: 1889190
cacaguggguuauugcaua

SEQ ID NO: 2584021 - RNA, 19 nt, Artificial Sequence
  Description of Artificial Sequence: Synthetic oligonucleotide
  Antisense strand to SEQ ID NO: 2584020
uaugcaauaacccacugug

SEQ ID NO: 2584022 - RNA, 19 nt, Artificial Sequence
  Description of Artificial Sequence: Synthetic oligonucleotide
  Sense strand starting at position 1732 of SEQ ID NO: 1889190
uggguuauugcauacagca

SEQ ID NO: 2584023 - RNA, 19 nt, Artificial Sequence
  Description of Artificial Sequence: Synthetic oligonucleotide
  Antisense strand to SEQ ID NO: 2584022
ugcuguaugcaauaaccca

SEQ ID NO: 2584024 - RNA, 19 nt, Artificial Sequence
  Description of Artificial Sequence: Synthetic oligonucleotide
  Sense strand starting at position 2015 of SEQ ID NO: 1889190
ucaugauccuaggagagaa

SEQ ID NO: 2584025 - RNA, 19 nt, Artificial Sequence
  Description of Artificial Sequence: Synthetic oligonucleotide
  Antisense strand to SEQ ID NO: 2584024
uucucuccuaggaucauga

SEQ ID NO: 2584026 - RNA, 19 nt, Artificial Sequence
  Description of Artificial Sequence: Synthetic oligonucleotide
  Sense strand starting at position 2037 of SEQ ID NO: 1889190
acgugagcuagccagaaga

SEQ ID NO: 2584027 - RNA, 19 nt, Artificial Sequence
  Description of Artificial Sequence: Synthetic oligonucleotide
  Antisense strand to SEQ ID NO: 2584026
ucuucuggcuagcucacgu

SEQ ID NO: 2584028 - RNA, 19 nt, Artificial Sequence
  Description of Artificial Sequence: Synthetic oligonucleotide
  Sense strand starting at position 2039 of SEQ ID NO: 1889190
gugagcuagccagaagaua

SEQ ID NO: 2584029 - RNA, 19 nt, Artificial Sequence
  Description of Artificial Sequence: Synthetic oligonucleotide
  Antisense strand to SEQ ID NO: 2584028
uaucuucuggcuagcucac

SEQ ID NO: 2584030 - RNA, 19 nt, Artificial Sequence
  Description of Artificial Sequence: Synthetic oligonucleotide
  Sense strand starting at position 2229 of SEQ ID NO: 1889190
agucuuccugcagaaccau

SEQ ID NO: 2584031 - RNA, 19 nt, Artificial Sequence
  Description of Artificial Sequence: Synthetic oligonucleotide
  Antisense strand to SEQ ID NO: 2584030
augguucugcaggaagacu

SEQ ID NO: 2584032 - RNA, 19 nt, Artificial Sequence
  Description of Artificial Sequence: Synthetic oligonucleotide
  Sense strand starting at position 2284 of SEQ ID NO: 1889190
aaauuauugugagucuuug

SEQ ID NO: 2584033 - RNA, 19 nt, Artificial Sequence
  Description of Artificial Sequence: Synthetic oligonucleotide
  Antisense strand to SEQ ID NO: 2584032
caaagacucacaauaauuu

SEQ ID NO: 2584034 - RNA, 19 nt, Artificial Sequence
  Description of Artificial Sequence: Synthetic oligonucleotide
  Sense strand starting at position 2477 of SEQ ID NO: 1889190
gccuguguggcucugcuua

SEQ ID NO: 2584035 - RNA, 19 nt, Artificial Sequence
  Description of Artificial Sequence: Synthetic oligonucleotide
  Antisense strand to SEQ ID NO: 2584034
uaagcagagccacacaggc

SEQ ID NO: 2584036 - RNA, 19 nt, Artificial Sequence
  Description of Artificial Sequence: Synthetic oligonucleotide
  Sense strand starting at position 2658 of SEQ ID NO: 1889190
ucaguauuccauuguccag

SEQ ID NO: 2584037 - RNA, 19 nt, Artificial Sequence
  Description of Artificial Sequence: Synthetic oligonucleotide
  Antisense strand to SEQ ID NO: 2584036
cuggacaauggaauacuga

SEQ ID NO: 2584038 - RNA, 19 nt, Artificial Sequence
  Description of Artificial Sequence: Synthetic oligonucleotide
  Sense strand starting at position 2676 of SEQ ID NO: 1889190
guggucaucccaggaagaa

SEQ ID NO: 2584039 - RNA, 19 nt, Artificial Sequence
  Description of Artificial Sequence: Synthetic oligonucleotide
  Antisense strand to SEQ ID NO: 2584038
uucuuccugggaugaccac

SEQ ID NO: 2584040 - RNA, 19 nt, Artificial Sequence
  Description of Artificial Sequence: Synthetic oligonucleotide
  Sense strand starting at position 2962 of SEQ ID NO: 1889190
gcaaguaguccacacuaug

SEQ ID NO: 2584041 - RNA, 19 nt, Artificial Sequence
  Description of Artificial Sequence: Synthetic oligonucleotide
  Antisense strand to SEQ ID NO: 2584040
cauaguguggacuacuugc

SEQ ID NO: 2584042 - RNA, 19 nt, Artificial Sequence
  Description of Artificial Sequence: Synthetic oligonucleotide
  Sense strand starting at position 2994 of SEQ ID NO: 1889190
gugggaguacuccaaugug

SEQ ID NO: 2584043 - RNA, 19 nt, Artificial Sequence
  Description of Artificial Sequence: Synthetic oligonucleotide
  Antisense strand to SEQ ID NO: 2584042
cacauuggaguacucccac

SEQ ID NO: 2584044 - RNA, 19 nt, Artificial Sequence
  Description of Artificial Sequence: Synthetic oligonucleotide
  Sense strand starting at position 3003 of SEQ ID NO: 1889190
cuccaaugugcagagaaca

SEQ ID NO: 2584045 - RNA, 19 nt, Artificial Sequence
  Description of Artificial Sequence: Synthetic oligonucleotide
  Antisense strand to SEQ ID NO: 2584044
uguucucugcacauuggag

SEQ ID NO: 2584046 - RNA, 19 nt, Artificial Sequence
  Description of Artificial Sequence: Synthetic oligonucleotide
  Sense strand starting at position 3085 of SEQ ID NO: 1889190
aaaugaaagugagaccuau

SEQ ID NO: 2584047 - RNA, 19 nt, Artificial Sequence
  Description of Artificial Sequence: Synthetic oligonucleotide
  Antisense strand to SEQ ID NO: 2584046
auaggucucacuuucauuu

SEQ ID NO: 2584048 - RNA, 19 nt, Artificial Sequence
  Description of Artificial Sequence: Synthetic oligonucleotide
  Sense strand starting at position 3190 of SEQ ID NO: 1889190
ggcucaacaucuucccaga

SEQ ID NO: 2584049 - RNA, 19 nt, Artificial Sequence
  Description of Artificial Sequence: Synthetic oligonucleotide
  Antisense strand to SEQ ID NO: 2584048
ucugggaagauguugagcc

SEQ ID NO: 2584050 - RNA, 19 nt, Artificial Sequence
  Description of Artificial Sequence: Synthetic oligonucleotide
  Sense strand starting at position 3321 of SEQ ID NO: 1889190
ggaaacucuugcucuccaa

SEQ ID NO: 2584051 - RNA, 19 nt, Artificial Sequence
  Description of Artificial Sequence: Synthetic oligonucleotide
  Antisense strand to SEQ ID NO: 2584050
uuggagagcaagaguuucc

SEQ ID NO: 2584052 - RNA, 19 nt, Artificial Sequence
  Description of Artificial Sequence: Synthetic oligonucleotide
  Sense strand starting at position 3356 of SEQ ID NO: 1889190
gcaugauuccuguaggaag

SEQ ID NO: 2584053 - RNA, 19 nt, Artificial Sequence
  Description of Artificial Sequence: Synthetic oligonucleotide
  Antisense strand to SEQ ID NO: 2584052
cuuccuacaggaaucaugc

SEQ ID NO: 2584054 - RNA, 19 nt, Artificial Sequence
  Description of Artificial Sequence: Synthetic oligonucleotide
  Sense strand starting at position 3597 of SEQ ID NO: 1889190
uuguuugcacuuugaagga

SEQ ID NO: 2584055 - RNA, 19 nt, Artificial Sequence
  Description of Artificial Sequence: Synthetic oligonucleotide
  Antisense strand to SEQ ID NO: 2584054
uccuucaaagugcaaacaa

SEQ ID NO: 2584056 - RNA, 19 nt, Artificial Sequence
  Description of Artificial Sequence: Synthetic oligonucleotide
  Sense strand starting at position 3643 of SEQ ID NO: 1889190
uugaauauugcuuagauuc

SEQ ID NO: 2584057 - RNA, 19 nt, Artificial Sequence
  Description of Artificial Sequence: Synthetic oligonucleotide
  Antisense strand to SEQ ID NO: 2584056
gaaucuaagcaauauucaa

SEQ ID NO: 2584058 - RNA, 19 nt, Artificial Sequence
  Description of Artificial Sequence: Synthetic oligonucleotide
  Sense strand starting at position 3828 of SEQ ID NO: 1889190
caguuugagguuugagaac

SEQ ID NO: 2584059 - RNA, 19 nt, Artificial Sequence
  Description of Artificial Sequence: Synthetic oligonucleotide
  Antisense strand to SEQ ID NO: 2584058
guucucaaaccucaaacug

SEQ ID NO: 2584060 - RNA, 19 nt, Artificial Sequence
  Description of Artificial Sequence: Synthetic oligonucleotide
  Sense strand starting at position 405 of SEQ ID NO: 1889191
ugugaagauagaugucaca

SEQ ID NO: 2584061 - RNA, 19 nt, Artificial Sequence
  Description of Artificial Sequence: Synthetic oligonucleotide
  Antisense strand to SEQ ID NO: 2584060
ugugacaucuaucuucaca

SEQ ID NO: 2584062 - RNA, 19 nt, Artificial Sequence
  Description of Artificial Sequence: Synthetic oligonucleotide
  Sense strand starting at position 408 of SEQ ID NO: 1889191
gaagauagaugucacagaa

SEQ ID NO: 2584063 - RNA, 19 nt, Artificial Sequence
  Description of Artificial Sequence: Synthetic oligonucleotide
  Antisense strand to SEQ ID NO: 2584062
uucugugacaucuaucuuc

SEQ ID NO: 2584064 - RNA, 19 nt, Artificial Sequence
  Description of Artificial Sequence: Synthetic oligonucleotide
  Sense strand starting at position 571 of SEQ ID NO: 1889191
acuaucauaccaggagcua

SEQ ID NO: 2584065 - RNA, 19 nt, Artificial Sequence
  Description of Artificial Sequence: Synthetic oligonucleotide
  Antisense strand to SEQ ID NO: 2584064
uagcuccugguaugauagu

SEQ ID NO: 2584066 - RNA, 19 nt, Artificial Sequence
  Description of Artificial Sequence: Synthetic oligonucleotide
  Sense strand starting at position 586 of SEQ ID NO: 1889191
gcuaaauggaagugagauc

SEQ ID NO: 2584067 - RNA, 19 nt, Artificial Sequence
  Description of Artificial Sequence: Synthetic oligonucleotide
  Antisense strand to SEQ ID NO: 2584066
gaucucacuuccauuuagc

SEQ ID NO: 2584068 - RNA, 19 nt, Artificial Sequence
  Description of Artificial Sequence: Synthetic oligonucleotide
  Sense strand starting at position 617 of SEQ ID NO: 1889191
guuugauguggccaccaca

SEQ ID NO: 2584069 - RNA, 19 nt, Artificial Sequence
  Description of Artificial Sequence: Synthetic oligonucleotide
  Antisense strand to SEQ ID NO: 2584068
ugugguggccacaucaaac

SEQ ID NO: 2584070 - RNA, 19 nt, Artificial Sequence
  Description of Artificial Sequence: Synthetic oligonucleotide
  Sense strand starting at position 885 of SEQ ID NO: 1889191
gcuugauaccuguaggaga

SEQ ID NO: 2584071 - RNA, 19 nt, Artificial Sequence
  Description of Artificial Sequence: Synthetic oligonucleotide
  Antisense strand to SEQ ID NO: 2584070
ucuccuacagguaucaagc

SEQ ID NO: 2584072 - RNA, 19 nt, Artificial Sequence
  Description of Artificial Sequence: Synthetic oligonucleotide
  Sense strand starting at position 1027 of SEQ ID NO: 1889191
acagaauuauuggcuucca

SEQ ID NO: 2584073 - RNA, 19 nt, Artificial Sequence
  Description of Artificial Sequence: Synthetic oligonucleotide
  Antisense strand to SEQ ID NO: 2584072
uggaagccaauaauucugu

SEQ ID NO: 2584074 - RNA, 19 nt, Artificial Sequence
  Description of Artificial Sequence: Synthetic oligonucleotide
  Sense strand starting at position 1372 of SEQ ID NO: 1889191
ugagaauacugcuccaccu

SEQ ID NO: 2584075 - RNA, 19 nt, Artificial Sequence
  Description of Artificial Sequence: Synthetic oligonucleotide
  Antisense strand to SEQ ID NO: 2584074
agguggagcaguauucuca

SEQ ID NO: 2584076 - RNA, 19 nt, Artificial Sequence
  Description of Artificial Sequence: Synthetic oligonucleotide
  Sense strand starting at position 1465 of SEQ ID NO: 1889191
gguuaagaaccuggccaua

SEQ ID NO: 2584077 - RNA, 19 nt, Artificial Sequence
  Description of Artificial Sequence: Synthetic oligonucleotide
  Antisense strand to SEQ ID NO: 2584076
uauggccagguucuuaacc

SEQ ID NO: 2584078 - RNA, 19 nt, Artificial Sequence
  Description of Artificial Sequence: Synthetic oligonucleotide
  Sense strand starting at position 1467 of SEQ ID NO: 1889191
uuaagaaccuggccauauu

SEQ ID NO: 2584079 - RNA, 19 nt, Artificial Sequence
  Description of Artificial Sequence: Synthetic oligonucleotide
  Antisense strand to SEQ ID NO: 2584078
aauauggccagguucuuaa

SEQ ID NO: 2584080 - RNA, 19 nt, Artificial Sequence
  Description of Artificial Sequence: Synthetic oligonucleotide
  Sense strand starting at position 1501 of SEQ ID NO: 1889191
ucuggagucacagguauga

SEQ ID NO: 2584081 - RNA, 19 nt, Artificial Sequence
  Description of Artificial Sequence: Synthetic oligonucleotide
  Antisense strand to SEQ ID NO: 2584080
ucauaccugugacuccaga

SEQ ID NO: 2584082 - RNA, 19 nt, Artificial Sequence
  Description of Artificial Sequence: Synthetic oligonucleotide
  Sense strand starting at position 1503 of SEQ ID NO: 1889191
uggagucacagguaugauu

SEQ ID NO: 2584083 - RNA, 19 nt, Artificial Sequence
  Description of Artificial Sequence: Synthetic oligonucleotide
  Antisense strand to SEQ ID NO: 2584082
aaucauaccugugacucca

SEQ ID NO: 2584084 - RNA, 19 nt, Artificial Sequence
  Description of Artificial Sequence: Synthetic oligonucleotide
  Sense strand starting at position 1505 of SEQ ID NO: 1889191
gagucacagguaugauucu

SEQ ID NO: 2584085 - RNA, 19 nt, Artificial Sequence
  Description of Artificial Sequence: Synthetic oligonucleotide
  Antisense strand to SEQ ID NO: 2584084
agaaucauaccugugacuc

SEQ ID NO: 2584086 - RNA, 19 nt, Artificial Sequence
  Description of Artificial Sequence: Synthetic oligonucleotide
  Sense strand starting at position 1670 of SEQ ID NO: 1889191
ggaacagaucacggguaca

SEQ ID NO: 2584087 - RNA, 19 nt, Artificial Sequence
  Description of Artificial Sequence: Synthetic oligonucleotide
  Antisense strand to SEQ ID NO: 2584086
uguacccgugaucuguucc

SEQ ID NO: 2584088 - RNA, 19 nt, Artificial Sequence
  Description of Artificial Sequence: Synthetic oligonucleotide
  Sense strand starting at position 1726 of SEQ ID NO: 1889191
cacaguggguuauugcaua

SEQ ID NO: 2584089 - RNA, 19 nt, Artificial Sequence
  Description of Artificial Sequence: Synthetic oligonucleotide
  Antisense strand to SEQ ID NO: 2584088
uaugcaauaacccacugug

SEQ ID NO: 2584090 - RNA, 19 nt, Artificial Sequence
  Description of Artificial Sequence: Synthetic oligonucleotide
  Sense strand starting at position 1731 of SEQ ID NO: 1889191
uggguuauugcauacagca

SEQ ID NO: 2584091 - RNA, 19 nt, Artificial Sequence
  Description of Artificial Sequence: Synthetic oligonucleotide
  Antisense strand to SEQ ID NO: 2584090
ugcuguaugcaauaaccca

SEQ ID NO: 2584092 - RNA, 19 nt, Artificial Sequence
  Description of Artificial Sequence: Synthetic oligonucleotide
  Sense strand starting at position 1915 of SEQ ID NO: 1889191
gccacaauucccugaggcu

SEQ ID NO: 2584093 - RNA, 19 nt, Artificial Sequence
  Description of Artificial Sequence: Synthetic oligonucleotide
  Antisense strand to SEQ ID NO: 2584092
agccucagggaauuguggc

SEQ ID NO: 2584094 - RNA, 19 nt, Artificial Sequence
  Description of Artificial Sequence: Synthetic oligonucleotide
  Sense strand starting at position 1916 of SEQ ID NO: 1889191
ccacaauucccugaggcuu

SEQ ID NO: 2584095 - RNA, 19 nt, Artificial Sequence
  Description of Artificial Sequence: Synthetic oligonucleotide
  Antisense strand to SEQ ID NO: 2584094
aagccucagggaauugugg

SEQ ID NO: 2584096 - RNA, 19 nt, Artificial Sequence
  Description of Artificial Sequence: Synthetic oligonucleotide
  Sense strand starting at position 1970 of SEQ ID NO: 1889191
caaggaaucuugccugucu

SEQ ID NO: 2584097 - RNA, 19 nt, Artificial Sequence
  Description of Artificial Sequence: Synthetic oligonucleotide
  Antisense strand to SEQ ID NO: 2584096
agacaggcaagauuccuug

SEQ ID NO: 2584098 - RNA, 19 nt, Artificial Sequence
  Description of Artificial Sequence: Synthetic oligonucleotide
  Sense strand starting at position 1971 of SEQ ID NO: 1889191
aaggaaucuugccugucuu

SEQ ID NO: 2584099 - RNA, 19 nt, Artificial Sequence
  Description of Artificial Sequence: Synthetic oligonucleotide
  Antisense strand to SEQ ID NO: 2584098
aagacaggcaagauuccuu

SEQ ID NO: 2584100 - RNA, 19 nt, Artificial Sequence
  Description of Artificial Sequence: Synthetic oligonucleotide
  Sense strand starting at position 1985 of SEQ ID NO: 1889191
gucuucuuugugggauaca

SEQ ID NO: 2584101 - RNA, 19 nt, Artificial Sequence
  Description of Artificial Sequence: Synthetic oligonucleotide
  Antisense strand to SEQ ID NO: 2584100
uguaucccacaaagaagac

SEQ ID NO: 2584102 - RNA, 19 nt, Artificial Sequence
  Description of Artificial Sequence: Synthetic oligonucleotide
  Sense strand starting at position 2014 of SEQ ID NO: 1889191
ucaugauccuaggagagaa

SEQ ID NO: 2584103 - RNA, 19 nt, Artificial Sequence
  Description of Artificial Sequence: Synthetic oligonucleotide
  Antisense strand to SEQ ID NO: 2584102
uucucuccuaggaucauga

SEQ ID NO: 2584104 - RNA, 19 nt, Artificial Sequence
  Description of Artificial Sequence: Synthetic oligonucleotide
  Sense strand starting at position 2036 of SEQ ID NO: 1889191
acgugagcuagccagaaga

SEQ ID NO: 2584105 - RNA, 19 nt, Artificial Sequence
  Description of Artificial Sequence: Synthetic oligonucleotide
  Antisense strand to SEQ ID NO: 2584104
ucuucuggcuagcucacgu

SEQ ID NO: 2584106 - RNA, 19 nt, Artificial Sequence
  Description of Artificial Sequence: Synthetic oligonucleotide
  Sense strand starting at position 2038 of SEQ ID NO: 1889191
gugagcuagccagaagaua

SEQ ID NO: 2584107 - RNA, 19 nt, Artificial Sequence
  Description of Artificial Sequence: Synthetic oligonucleotide
  Antisense strand to SEQ ID NO: 2584106
uaucuucuggcuagcucac

SEQ ID NO: 2584108 - RNA, 19 nt, Artificial Sequence
  Description of Artificial Sequence: Synthetic oligonucleotide
  Sense strand starting at position 2228 of SEQ ID NO: 1889191
agucuuccugcagaaccau

SEQ ID NO: 2584109 - RNA, 19 nt, Artificial Sequence
  Description of Artificial Sequence: Synthetic oligonucleotide
  Antisense strand to SEQ ID NO: 2584108
augguucugcaggaagacu

SEQ ID NO: 2584110 - RNA, 19 nt, Artificial Sequence
  Description of Artificial Sequence: Synthetic oligonucleotide
  Sense strand starting at position 2283 of SEQ ID NO: 1889191
aaauuauugugagucuuug

SEQ ID NO: 2584111 - RNA, 19 nt, Artificial Sequence
  Description of Artificial Sequence: Synthetic oligonucleotide
  Antisense strand to SEQ ID NO: 2584110
caaagacucacaauaauuu

SEQ ID NO: 2584112 - RNA, 19 nt, Artificial Sequence
  Description of Artificial Sequence: Synthetic oligonucleotide
  Sense strand starting at position 2474 of SEQ ID NO: 1889191
gccuguguggcucugcuua

SEQ ID NO: 2584113 - RNA, 19 nt, Artificial Sequence
  Description of Artificial Sequence: Synthetic oligonucleotide
  Antisense strand to SEQ ID NO: 2584112
uaagcagagccacacaggc

SEQ ID NO: 2584114 - RNA, 19 nt, Artificial Sequence
  Description of Artificial Sequence: Synthetic oligonucleotide
  Sense strand starting at position 2603 of SEQ ID NO: 1889191
gcugcucuucuagaaagaa

SEQ ID NO: 2584115 - RNA, 19 nt, Artificial Sequence
  Description of Artificial Sequence: Synthetic oligonucleotide
  Antisense strand to SEQ ID NO: 2584114
uucuuucuagaagagcagc

SEQ ID NO: 2584116 - RNA, 19 nt, Artificial Sequence
  Description of Artificial Sequence: Synthetic oligonucleotide
  Sense strand starting at position 2655 of SEQ ID NO: 1889191
ucaguauuccauuguccag

SEQ ID NO: 2584117 - RNA, 19 nt, Artificial Sequence
  Description of Artificial Sequence: Synthetic oligonucleotide
  Antisense strand to SEQ ID NO: 2584116
cuggacaauggaauacuga

SEQ ID NO: 2584118 - RNA, 19 nt, Artificial Sequence
  Description of Artificial Sequence: Synthetic oligonucleotide
  Sense strand starting at position 2673 of SEQ ID NO: 1889191
guggucaucccaggaagaa

SEQ ID NO: 2584119 - RNA, 19 nt, Artificial Sequence
  Description of Artificial Sequence: Synthetic oligonucleotide
  Antisense strand to SEQ ID NO: 2584118
uucuuccugggaugaccac

SEQ ID NO: 2584120 - RNA, 19 nt, Artificial Sequence
  Description of Artificial Sequence: Synthetic oligonucleotide
  Sense strand starting at position 2959 of SEQ ID NO: 1889191
gcaaguaguccacacuaug

SEQ ID NO: 2584121 - RNA, 19 nt, Artificial Sequence
  Description of Artificial Sequence: Synthetic oligonucleotide
  Antisense strand to SEQ ID NO: 2584120
cauaguguggacuacuugc

SEQ ID NO: 2584122 - RNA, 19 nt, Artificial Sequence
  Description of Artificial Sequence: Synthetic oligonucleotide
  Sense strand starting at position 2969 of SEQ ID NO: 1889191
cacacuauggccugauguu

SEQ ID NO: 2584123 - RNA, 19 nt, Artificial Sequence
  Description of Artificial Sequence: Synthetic oligonucleotide
  Antisense strand to SEQ ID NO: 2584122
aacaucaggccauagugug

SEQ ID NO: 2584124 - RNA, 19 nt, Artificial Sequence
  Description of Artificial Sequence: Synthetic oligonucleotide
  Sense strand starting at position 2981 of SEQ ID NO: 1889191
ugauguucaggugggagua

SEQ ID NO: 2584125 - RNA, 19 nt, Artificial Sequence
  Description of Artificial Sequence: Synthetic oligonucleotide
  Antisense strand to SEQ ID NO: 2584124
uacucccaccugaacauca

SEQ ID NO: 2584126 - RNA, 19 nt, Artificial Sequence
  Description of Artificial Sequence: Synthetic oligonucleotide
  Sense strand starting at position 3000 of SEQ ID NO: 1889191
cuccaaugugcagagaaca

SEQ ID NO: 2584127 - RNA, 19 nt, Artificial Sequence
  Description of Artificial Sequence: Synthetic oligonucleotide
  Antisense strand to SEQ ID NO: 2584126
uguucucugcacauuggag

SEQ ID NO: 2584128 - RNA, 19 nt, Artificial Sequence
  Description of Artificial Sequence: Synthetic oligonucleotide
  Sense strand starting at position 3082 of SEQ ID NO: 1889191
aaaugaaagugagaccuau

SEQ ID NO: 2584129 - RNA, 19 nt, Artificial Sequence
  Description of Artificial Sequence: Synthetic oligonucleotide
  Antisense strand to SEQ ID NO: 2584128
auaggucucacuuucauuu

SEQ ID NO: 2584130 - RNA, 19 nt, Artificial Sequence
  Description of Artificial Sequence: Synthetic oligonucleotide
  Sense strand starting at position 3113 of SEQ ID NO: 1889191
ggaugugaccuccacacuu

SEQ ID NO: 2584131 - RNA, 19 nt, Artificial Sequence
  Description of Artificial Sequence: Synthetic oligonucleotide
  Antisense strand to SEQ ID NO: 2584130
aaguguggaggucacaucc

SEQ ID NO: 2584132 - RNA, 19 nt, Artificial Sequence
  Description of Artificial Sequence: Synthetic oligonucleotide
  Sense strand starting at position 3187 of SEQ ID NO: 1889191
ggcucaacaucuucccaga

SEQ ID NO: 2584133 - RNA, 19 nt, Artificial Sequence
  Description of Artificial Sequence: Synthetic oligonucleotide
  Antisense strand to SEQ ID NO: 2584132
ucugggaagauguugagcc

SEQ ID NO: 2584134 - RNA, 19 nt, Artificial Sequence
  Description of Artificial Sequence: Synthetic oligonucleotide
  Sense strand starting at position 3353 of SEQ ID NO: 1889191
gcaugauuccuguaggaag

SEQ ID NO: 2584135 - RNA, 19 nt, Artificial Sequence
  Description of Artificial Sequence: Synthetic oligonucleotide
  Antisense strand to SEQ ID NO: 2584134
cuuccuacaggaaucaugc

SEQ ID NO: 2584136 - RNA, 19 nt, Artificial Sequence
  Description of Artificial Sequence: Synthetic oligonucleotide
  Sense strand starting at position 3640 of SEQ ID NO: 1889191
uugaauauugcuuagauuc

SEQ ID NO: 2584137 - RNA, 19 nt, Artificial Sequence
  Description of Artificial Sequence: Synthetic oligonucleotide
  Antisense strand to SEQ ID NO: 2584136
gaaucuaagcaauauucaa

SEQ ID NO: 2584138 - RNA, 19 nt, Artificial Sequence
  Description of Artificial Sequence: Synthetic oligonucleotide
  Sense strand starting at position 3774 of SEQ ID NO: 1889191
acagauggccucugagaua

SEQ ID NO: 2584139 - RNA, 19 nt, Artificial Sequence
  Description of Artificial Sequence: Synthetic oligonucleotide
  Antisense strand to SEQ ID NO: 2584138
uaucucagaggccaucugu

SEQ ID NO: 2584140 - RNA, 19 nt, Artificial Sequence
  Description of Artificial Sequence: Synthetic oligonucleotide
  Sense strand starting at position 27 of SEQ ID NO: 1889192
gauugugagcucuaacuag

SEQ ID NO: 2584141 - RNA, 19 nt, Artificial Sequence
  Description of Artificial Sequence: Synthetic oligonucleotide
  Antisense strand to SEQ ID NO: 2584140
cuaguuagagcucacaauc

SEQ ID NO: 2584142 - RNA, 19 nt, Artificial Sequence
  Description of Artificial Sequence: Synthetic oligonucleotide
  Sense strand starting at position 113 of SEQ ID NO: 1889192
ggaggugcaucagucauga

SEQ ID NO: 2584143 - RNA, 19 nt, Artificial Sequence
  Description of Artificial Sequence: Synthetic oligonucleotide
  Antisense strand to SEQ ID NO: 2584142
ucaugacugaugcaccucc

SEQ ID NO: 2584144 - RNA, 19 nt, Artificial Sequence
  Description of Artificial Sequence: Synthetic oligonucleotide
  Sense strand starting at position 149 of SEQ ID NO: 1889192
cuguguuauccacaggauu

SEQ ID NO: 2584145 - RNA, 19 nt, Artificial Sequence
  Description of Artificial Sequence: Synthetic oligonucleotide
  Antisense strand to SEQ ID NO: 2584144
aauccuguggauaacacag

SEQ ID NO: 2584146 - RNA, 19 nt, Artificial Sequence
  Description of Artificial Sequence: Synthetic oligonucleotide
  Sense strand starting at position 162 of SEQ ID NO: 1889192
aggauugucccaugagagu

SEQ ID NO: 2584147 - RNA, 19 nt, Artificial Sequence
  Description of Artificial Sequence: Synthetic oligonucleotide
  Antisense strand to SEQ ID NO: 2584146
acucucaugggacaauccu

SEQ ID NO: 2584148 - RNA, 19 nt, Artificial Sequence
  Description of Artificial Sequence: Synthetic oligonucleotide
  Sense strand starting at position 292 of SEQ ID NO: 1889192
agauauuguagaggugagu

SEQ ID NO: 2584149 - RNA, 19 nt, Artificial Sequence
  Description of Artificial Sequence: Synthetic oligonucleotide
  Antisense strand to SEQ ID NO: 2584148
acucaccucuacaauaucu

SEQ ID NO: 2584150 - RNA, 19 nt, Artificial Sequence
  Description of Artificial Sequence: Synthetic oligonucleotide
  Sense strand starting at position 382 of SEQ ID NO: 1889192
gguggagauaccugcagaa

SEQ ID NO: 2584151 - RNA, 19 nt, Artificial Sequence
  Description of Artificial Sequence: Synthetic oligonucleotide
  Antisense strand to SEQ ID NO: 2584150
uucugcagguaucuccacc

SEQ ID NO: 2584152 - RNA, 19 nt, Artificial Sequence
  Description of Artificial Sequence: Synthetic oligonucleotide
  Sense strand starting at position 1037 of SEQ ID NO: 1889192
aaagacaguguuuaaagca

SEQ ID NO: 2584153 - RNA, 19 nt, Artificial Sequence
  Description of Artificial Sequence: Synthetic oligonucleotide
  Antisense strand to SEQ ID NO: 2584152
ugcuuuaaacacugucuuu

SEQ ID NO: 2584154 - RNA, 19 nt, Artificial Sequence
  Description of Artificial Sequence: Synthetic oligonucleotide
  Sense strand starting at position 1115 of SEQ ID NO: 1889192
ugguguucaggugggaaua

SEQ ID NO: 2584155 - RNA, 19 nt, Artificial Sequence
  Description of Artificial Sequence: Synthetic oligonucleotide
  Antisense strand to SEQ ID NO: 2584154
uauucccaccugaacacca

SEQ ID NO: 2584156 - RNA, 19 nt, Artificial Sequence
  Description of Artificial Sequence: Synthetic oligonucleotide
  Sense strand starting at position 1197 of SEQ ID NO: 1889192
gggcuuucauauucggaga

SEQ ID NO: 2584157 - RNA, 19 nt, Artificial Sequence
  Description of Artificial Sequence: Synthetic oligonucleotide
  Antisense strand to SEQ ID NO: 2584156
ucuccgaauaugaaagccc

SEQ ID NO: 2584158 - RNA, 19 nt, Artificial Sequence
  Description of Artificial Sequence: Synthetic oligonucleotide
  Sense strand starting at position 1232 of SEQ ID NO: 1889192
aauugauucugggugggau

SEQ ID NO: 2584159 - RNA, 19 nt, Artificial Sequence
  Description of Artificial Sequence: Synthetic oligonucleotide
  Antisense strand to SEQ ID NO: 2584158
aucccacccagaaucaauu

SEQ ID NO: 2584160 - RNA, 19 nt, Artificial Sequence
  Description of Artificial Sequence: Synthetic oligonucleotide
  Sense strand starting at position 1233 of SEQ ID NO: 1889192
auugauucugggugggaug

SEQ ID NO: 2584161 - RNA, 19 nt, Artificial Sequence
  Description of Artificial Sequence: Synthetic oligonucleotide
  Antisense strand to SEQ ID NO: 2584160
caucccacccagaaucaau

SEQ ID NO: 2584162 - RNA, 19 nt, Artificial Sequence
  Description of Artificial Sequence: Synthetic oligonucleotide
  Sense strand starting at position 1277 of SEQ ID NO: 1889192
ugacuucuauguuccucau

SEQ ID NO: 2584163 - RNA, 19 nt, Artificial Sequence
  Description of Artificial Sequence: Synthetic oligonucleotide
  Antisense strand to SEQ ID NO: 2584162
augaggaacauagaaguca

SEQ ID NO: 2584164 - RNA, 19 nt, Artificial Sequence
  Description of Artificial Sequence: Synthetic oligonucleotide
  Sense strand starting at position 1499 of SEQ ID NO: 1889192
aucgaauggcugcauaaua

SEQ ID NO: 2584165 - RNA, 19 nt, Artificial Sequence
  Description of Artificial Sequence: Synthetic oligonucleotide
  Antisense strand to SEQ ID NO: 2584164
uauuaugcagccauucgau

SEQ ID NO: 2584166 - RNA, 19 nt, Artificial Sequence
  Description of Artificial Sequence: Synthetic oligonucleotide
  Sense strand starting at position 1749 of SEQ ID NO: 1889192
ugcacuuugcaggagaguu

SEQ ID NO: 2584167 - RNA, 19 nt, Artificial Sequence
  Description of Artificial Sequence: Synthetic oligonucleotide
  Antisense strand to SEQ ID NO: 2584166
aacucuccugcaaagugca

SEQ ID NO: 2584168 - RNA, 19 nt, Artificial Sequence
  Description of Artificial Sequence: Synthetic oligonucleotide
  Sense strand starting at position 2122 of SEQ ID NO: 1889192
guuggucucagguaagauu

SEQ ID NO: 2584169 - RNA, 19 nt, Artificial Sequence
  Description of Artificial Sequence: Synthetic oligonucleotide
  Antisense strand to SEQ ID NO: 2584168
aaucuuaccugagaccaac

SEQ ID NO: 2584170 - RNA, 19 nt, Artificial Sequence
  Description of Artificial Sequence: Synthetic oligonucleotide
  Sense strand starting at position 2193 of SEQ ID NO: 1889192
gugaccugauucuuguaca

SEQ ID NO: 2584171 - RNA, 19 nt, Artificial Sequence
  Description of Artificial Sequence: Synthetic oligonucleotide
  Antisense strand to SEQ ID NO: 2584170
uguacaagaaucaggucac

SEQ ID NO: 2584172 - RNA, 19 nt, Artificial Sequence
  Description of Artificial Sequence: Synthetic oligonucleotide
  Sense strand starting at position 2198 of SEQ ID NO: 1889192
cugauucuuguacacauau

SEQ ID NO: 2584173 - RNA, 19 nt, Artificial Sequence
  Description of Artificial Sequence: Synthetic oligonucleotide
  Antisense strand to SEQ ID NO: 2584172
auauguguacaagaaucag

SEQ ID NO: 2584174 - RNA, 19 nt, Artificial Sequence
  Description of Artificial Sequence: Synthetic oligonucleotide
  Sense strand starting at position 2523 of SEQ ID NO: 1889192
ucacaaugacugugacugu

SEQ ID NO: 2584175 - RNA, 19 nt, Artificial Sequence
  Description of Artificial Sequence: Synthetic oligonucleotide
  Antisense strand to SEQ ID NO: 2584174
acagucacagucauuguga

SEQ ID NO: 2584176 - RNA, 19 nt, Artificial Sequence
  Description of Artificial Sequence: Synthetic oligonucleotide
  Sense strand starting at position 2548 of SEQ ID NO: 1889192
cugagaagucccugaggcu

SEQ ID NO: 2584177 - RNA, 19 nt, Artificial Sequence
  Description of Artificial Sequence: Synthetic oligonucleotide
  Antisense strand to SEQ ID NO: 2584176
agccucagggacuucucag

SEQ ID NO: 2584178 - RNA, 19 nt, Artificial Sequence
  Description of Artificial Sequence: Synthetic oligonucleotide
  Sense strand starting at position 2549 of SEQ ID NO: 1889192
ugagaagucccugaggcuu

SEQ ID NO: 2584179 - RNA, 19 nt, Artificial Sequence
  Description of Artificial Sequence: Synthetic oligonucleotide
  Antisense strand to SEQ ID NO: 2584178
aagccucagggacuucuca

SEQ ID NO: 2584180 - RNA, 19 nt, Artificial Sequence
  Description of Artificial Sequence: Synthetic oligonucleotide
  Sense strand starting at position 2586 of SEQ ID NO: 1889192
cguggaggugcguuagcau

SEQ ID NO: 2584181 - RNA, 19 nt, Artificial Sequence
  Description of Artificial Sequence: Synthetic oligonucleotide
  Antisense strand to SEQ ID NO: 2584180
augcuaacgcaccuccacg

SEQ ID NO: 2584182 - RNA, 19 nt, Artificial Sequence
  Description of Artificial Sequence: Synthetic oligonucleotide
  Sense strand starting at position 2683 of SEQ ID NO: 1889192
acgagaauccauugcuuga

SEQ ID NO: 2584183 - RNA, 19 nt, Artificial Sequence
  Description of Artificial Sequence: Synthetic oligonucleotide
  Antisense strand to SEQ ID NO: 2584182
ucaagcaauggauucucgu

SEQ ID NO: 2584184 - RNA, 19 nt, Artificial Sequence
  Description of Artificial Sequence: Synthetic oligonucleotide
  Sense strand starting at position 2685 of SEQ ID NO: 1889192
gagaauccauugcuugagu

SEQ ID NO: 2584185 - RNA, 19 nt, Artificial Sequence
  Description of Artificial Sequence: Synthetic oligonucleotide
  Antisense strand to SEQ ID NO: 2584184
acucaagcaauggauucuc

SEQ ID NO: 2584186 - RNA, 19 nt, Artificial Sequence
  Description of Artificial Sequence: Synthetic oligonucleotide
  Sense strand starting at position 2741 of SEQ ID NO: 1889192
aagcucugagauuguuaaa

SEQ ID NO: 2584187 - RNA, 19 nt, Artificial Sequence
  Description of Artificial Sequence: Synthetic oligonucleotide
  Antisense strand to SEQ ID NO: 2584186
uuuaacaaucucagagcuu

SEQ ID NO: 2584188 - RNA, 19 nt, Artificial Sequence
  Description of Artificial Sequence: Synthetic oligonucleotide
  Sense strand starting at position 2825 of SEQ ID NO: 1889192
gcauaauuccugcaggaug

SEQ ID NO: 2584189 - RNA, 19 nt, Artificial Sequence
  Description of Artificial Sequence: Synthetic oligonucleotide
  Antisense strand to SEQ ID NO: 2584188
cauccugcaggaauuaugc

SEQ ID NO: 2584190 - RNA, 19 nt, Artificial Sequence
  Description of Artificial Sequence: Synthetic oligonucleotide
  Sense strand starting at position 2827 of SEQ ID NO: 1889192
auaauuccugcaggaugaa

SEQ ID NO: 2584191 - RNA, 19 nt, Artificial Sequence
  Description of Artificial Sequence: Synthetic oligonucleotide
  Antisense strand to SEQ ID NO: 2584190
uucauccugcaggaauuau

SEQ ID NO: 2584192 - RNA, 19 nt, Artificial Sequence
  Description of Artificial Sequence: Synthetic oligonucleotide
  Sense strand starting at position 2956 of SEQ ID NO: 1889192
gacugcuucuggcuaggga

SEQ ID NO: 2584193 - RNA, 19 nt, Artificial Sequence
  Description of Artificial Sequence: Synthetic oligonucleotide
  Antisense strand to SEQ ID NO: 2584192
ucccuagccagaagcaguc

SEQ ID NO: 2584194 - RNA, 19 nt, Artificial Sequence
  Description of Artificial Sequence: Synthetic oligonucleotide
  Sense strand starting at position 2957 of SEQ ID NO: 1889192
acugcuucuggcuagggau

SEQ ID NO: 2584195 - RNA, 19 nt, Artificial Sequence
  Description of Artificial Sequence: Synthetic oligonucleotide
  Antisense strand to SEQ ID NO: 2584194
aucccuagccagaagcagu

SEQ ID NO: 2584196 - RNA, 19 nt, Artificial Sequence
  Description of Artificial Sequence: Synthetic oligonucleotide
  Sense strand starting at position 3062 of SEQ ID NO: 1889192
agaauauuugcacguggca

SEQ ID NO: 2584197 - RNA, 19 nt, Artificial Sequence
  Description of Artificial Sequence: Synthetic oligonucleotide
  Antisense strand to SEQ ID NO: 2584196
ugccacgugcaaauauucu

SEQ ID NO: 2584198 - RNA, 19 nt, Artificial Sequence
  Description of Artificial Sequence: Synthetic oligonucleotide
  Sense strand starting at position 3065 of SEQ ID NO: 1889192
auauuugcacguggcaaga

SEQ ID NO: 2584199 - RNA, 19 nt, Artificial Sequence
  Description of Artificial Sequence: Synthetic oligonucleotide
  Antisense strand to SEQ ID NO: 2584198
ucuugccacgugcaaauau

SEQ ID NO: 2584200 - RNA, 19 nt, Artificial Sequence
  Description of Artificial Sequence: Synthetic oligonucleotide
  Sense strand starting at position 3146 of SEQ ID NO: 1889192
guucucuuaggugagacuu

SEQ ID NO: 2584201 - RNA, 19 nt, Artificial Sequence
  Description of Artificial Sequence: Synthetic oligonucleotide
  Antisense strand to SEQ ID NO: 2584200
aagucucaccuaagagaac

SEQ ID NO: 2584202 - RNA, 19 nt, Artificial Sequence
  Description of Artificial Sequence: Synthetic oligonucleotide
  Sense strand starting at position 3294 of SEQ ID NO: 1889192
ggcaguaugaggugugaga

SEQ ID NO: 2584203 - RNA, 19 nt, Artificial Sequence
  Description of Artificial Sequence: Synthetic oligonucleotide
  Antisense strand to SEQ ID NO: 2584202
ucucacaccucauacugcc

SEQ ID NO: 2584204 - RNA, 19 nt, Artificial Sequence
  Description of Artificial Sequence: Synthetic oligonucleotide
  Sense strand starting at position 3305 of SEQ ID NO: 1889192
gugugagaacagugaucca

SEQ ID NO: 2584205 - RNA, 19 nt, Artificial Sequence
  Description of Artificial Sequence: Synthetic oligonucleotide
  Antisense strand to SEQ ID NO: 2584204
uggaucacuguucucacac

SEQ ID NO: 2584206 - RNA, 19 nt, Artificial Sequence
  Description of Artificial Sequence: Synthetic oligonucleotide
  Sense strand starting at position 3308 of SEQ ID NO: 1889192
ugagaacagugauccaacu

SEQ ID NO: 2584207 - RNA, 19 nt, Artificial Sequence
  Description of Artificial Sequence: Synthetic oligonucleotide
  Antisense strand to SEQ ID NO: 2584206
aguuggaucacuguucuca

SEQ ID NO: 2584208 - RNA, 19 nt, Artificial Sequence
  Description of Artificial Sequence: Synthetic oligonucleotide
  Sense strand starting at position 3348 of SEQ ID NO: 1889192
uucugucuuuccuugagag

SEQ ID NO: 2584209 - RNA, 19 nt, Artificial Sequence
  Description of Artificial Sequence: Synthetic oligonucleotide
  Antisense strand to SEQ ID NO: 2584208
cucucaaggaaagacagaa

SEQ ID NO: 2584210 - RNA, 19 nt, Artificial Sequence
  Description of Artificial Sequence: Synthetic oligonucleotide
  Sense strand starting at position 3400 of SEQ ID NO: 1889192
agguuaagaguccgaccau

SEQ ID NO: 2584211 - RNA, 19 nt, Artificial Sequence
  Description of Artificial Sequence: Synthetic oligonucleotide
  Antisense strand to SEQ ID NO: 2584210
auggucggacucuuaaccu

SEQ ID NO: 2584212 - RNA, 19 nt, Artificial Sequence
  Description of Artificial Sequence: Synthetic oligonucleotide
  Sense strand starting at position 3701 of SEQ ID NO: 1889192
caggacaacucugucugua

SEQ ID NO: 2584213 - RNA, 19 nt, Artificial Sequence
  Description of Artificial Sequence: Synthetic oligonucleotide
  Antisense strand to SEQ ID NO: 2584212
uacagacagaguuguccug

SEQ ID NO: 2584214 - RNA, 19 nt, Artificial Sequence
  Description of Artificial Sequence: Synthetic oligonucleotide
  Sense strand starting at position 3832 of SEQ ID NO: 1889192
cuugcaucagcauaaaugu

SEQ ID NO: 2584215 - RNA, 19 nt, Artificial Sequence
  Description of Artificial Sequence: Synthetic oligonucleotide
  Antisense strand to SEQ ID NO: 2584214
acauuuaugcugaugcaag

SEQ ID NO: 2584216 - RNA, 19 nt, Artificial Sequence
  Description of Artificial Sequence: Synthetic oligonucleotide
  Sense strand starting at position 3877 of SEQ ID NO: 1889192
cagcuuggugaaugagacu

SEQ ID NO: 2584217 - RNA, 19 nt, Artificial Sequence
  Description of Artificial Sequence: Synthetic oligonucleotide
  Antisense strand to SEQ ID NO: 2584216
agucucauucaccaagcug

SEQ ID NO: 2584218 - RNA, 19 nt, Artificial Sequence
  Description of Artificial Sequence: Synthetic oligonucleotide
  Sense strand starting at position 3888 of SEQ ID NO: 1889192
augagacuucuguagaggu

SEQ ID NO: 2584219 - RNA, 19 nt, Artificial Sequence
  Description of Artificial Sequence: Synthetic oligonucleotide
  Antisense strand to SEQ ID NO: 2584218
accucuacagaagucucau

SEQ ID NO: 2584220 - RNA, 19 nt, Artificial Sequence
  Description of Artificial Sequence: Synthetic oligonucleotide
  Sense strand starting at position 26 of SEQ ID NO: 1889193
gauugugagcucuaacuag

SEQ ID NO: 2584221 - RNA, 19 nt, Artificial Sequence
  Description of Artificial Sequence: Synthetic oligonucleotide
  Antisense strand to SEQ ID NO: 2584220
cuaguuagagcucacaauc

SEQ ID NO: 2584222 - RNA, 19 nt, Artificial Sequence
  Description of Artificial Sequence: Synthetic oligonucleotide
  Sense strand starting at position 112 of SEQ ID NO: 1889193
ggaggugcaucagucauga

SEQ ID NO: 2584223 - RNA, 19 nt, Artificial Sequence
  Description of Artificial Sequence: Synthetic oligonucleotide
  Antisense strand to SEQ ID NO: 2584222
ucaugacugaugcaccucc

SEQ ID NO: 2584224 - RNA, 19 nt, Artificial Sequence
  Description of Artificial Sequence: Synthetic oligonucleotide
  Sense strand starting at position 148 of SEQ ID NO: 1889193
cuguguuauccacaggauu

SEQ ID NO: 2584225 - RNA, 19 nt, Artificial Sequence
  Description of Artificial Sequence: Synthetic oligonucleotide
  Antisense strand to SEQ ID NO: 2584224
aauccuguggauaacacag

SEQ ID NO: 2584226 - RNA, 19 nt, Artificial Sequence
  Description of Artificial Sequence: Synthetic oligonucleotide
  Sense strand starting at position 161 of SEQ ID NO: 1889193
aggauugucccaugagagu

SEQ ID NO: 2584227 - RNA, 19 nt, Artificial Sequence
  Description of Artificial Sequence: Synthetic oligonucleotide
  Antisense strand to SEQ ID NO: 2584226
acucucaugggacaauccu

SEQ ID NO: 2584228 - RNA, 19 nt, Artificial Sequence
  Description of Artificial Sequence: Synthetic oligonucleotide
  Sense strand starting at position 278 of SEQ ID NO: 1889193
cucagauaugccuagauau

SEQ ID NO: 2584229 - RNA, 19 nt, Artificial Sequence
  Description of Artificial Sequence: Synthetic oligonucleotide
  Antisense strand to SEQ ID NO: 2584228
auaucuaggcauaucugag

SEQ ID NO: 2584230 - RNA, 19 nt, Artificial Sequence
  Description of Artificial Sequence: Synthetic oligonucleotide
  Sense strand starting at position 291 of SEQ ID NO: 1889193
agauauuguagaggugagu

SEQ ID NO: 2584231 - RNA, 19 nt, Artificial Sequence
  Description of Artificial Sequence: Synthetic oligonucleotide
  Antisense strand to SEQ ID NO: 2584230
acucaccucuacaauaucu

SEQ ID NO: 2584232 - RNA, 19 nt, Artificial Sequence
  Description of Artificial Sequence: Synthetic oligonucleotide
  Sense strand starting at position 381 of SEQ ID NO: 1889193
gguggagauaccugcagaa

SEQ ID NO: 2584233 - RNA, 19 nt, Artificial Sequence
  Description of Artificial Sequence: Synthetic oligonucleotide
  Antisense strand to SEQ ID NO: 2584232
uucugcagguaucuccacc

SEQ ID NO: 2584234 - RNA, 19 nt, Artificial Sequence
  Description of Artificial Sequence: Synthetic oligonucleotide
  Sense strand starting at position 965 of SEQ ID NO: 1889193
gucagauacaggugaguau

SEQ ID NO: 2584235 - RNA, 19 nt, Artificial Sequence
  Description of Artificial Sequence: Synthetic oligonucleotide
  Antisense strand to SEQ ID NO: 2584234
auacucaccuguaucugac

SEQ ID NO: 2584236 - RNA, 19 nt, Artificial Sequence
  Description of Artificial Sequence: Synthetic oligonucleotide
  Sense strand starting at position 1036 of SEQ ID NO: 1889193
aaagacaguguuuaaagca

SEQ ID NO: 2584237 - RNA, 19 nt, Artificial Sequence
  Description of Artificial Sequence: Synthetic oligonucleotide
  Antisense strand to SEQ ID NO: 2584236
ugcuuuaaacacugucuuu

SEQ ID NO: 2584238 - RNA, 19 nt, Artificial Sequence
  Description of Artificial Sequence: Synthetic oligonucleotide
  Sense strand starting at position 1114 of SEQ ID NO: 1889193
ugguguucaggugggaaua

SEQ ID NO: 2584239 - RNA, 19 nt, Artificial Sequence
  Description of Artificial Sequence: Synthetic oligonucleotide
  Antisense strand to SEQ ID NO: 2584238
uauucccaccugaacacca

SEQ ID NO: 2584240 - RNA, 19 nt, Artificial Sequence
  Description of Artificial Sequence: Synthetic oligonucleotide
  Sense strand starting at position 1196 of SEQ ID NO: 1889193
gggcuuucauauucggaga

SEQ ID NO: 2584241 - RNA, 19 nt, Artificial Sequence
  Description of Artificial Sequence: Synthetic oligonucleotide
  Antisense strand to SEQ ID NO: 2584240
ucuccgaauaugaaagccc

SEQ ID NO: 2584242 - RNA, 19 nt, Artificial Sequence
  Description of Artificial Sequence: Synthetic oligonucleotide
  Sense strand starting at position 1231 of SEQ ID NO: 1889193
aauugauucugggugggau

SEQ ID NO: 2584243 - RNA, 19 nt, Artificial Sequence
  Description of Artificial Sequence: Synthetic oligonucleotide
  Antisense strand to SEQ ID NO: 2584242
aucccacccagaaucaauu

SEQ ID NO: 2584244 - RNA, 19 nt, Artificial Sequence
  Description of Artificial Sequence: Synthetic oligonucleotide
  Sense strand starting at position 1232 of SEQ ID NO: 1889193
auugauucugggugggaug

SEQ ID NO: 2584245 - RNA, 19 nt, Artificial Sequence
  Description of Artificial Sequence: Synthetic oligonucleotide
  Antisense strand to SEQ ID NO: 2584244
caucccacccagaaucaau

SEQ ID NO: 2584246 - RNA, 19 nt, Artificial Sequence
  Description of Artificial Sequence: Synthetic oligonucleotide
  Sense strand starting at position 1498 of SEQ ID NO: 1889193
aucgaauggcugcauaaua

SEQ ID NO: 2584247 - RNA, 19 nt, Artificial Sequence
  Description of Artificial Sequence: Synthetic oligonucleotide
  Antisense strand to SEQ ID NO: 2584246
uauuaugcagccauucgau

SEQ ID NO: 2584248 - RNA, 19 nt, Artificial Sequence
  Description of Artificial Sequence: Synthetic oligonucleotide
  Sense strand starting at position 2121 of SEQ ID NO: 1889193
guuggucucagguaagauu

SEQ ID NO: 2584249 - RNA, 19 nt, Artificial Sequence
  Description of Artificial Sequence: Synthetic oligonucleotide
  Antisense strand to SEQ ID NO: 2584248
aaucuuaccugagaccaac

SEQ ID NO: 2584250 - RNA, 19 nt, Artificial Sequence
  Description of Artificial Sequence: Synthetic oligonucleotide
  Sense strand starting at position 2192 of SEQ ID NO: 1889193
gugaccugauucuuguaca

SEQ ID NO: 2584251 - RNA, 19 nt, Artificial Sequence
  Description of Artificial Sequence: Synthetic oligonucleotide
  Antisense strand to SEQ ID NO: 2584250
uguacaagaaucaggucac

SEQ ID NO: 2584252 - RNA, 19 nt, Artificial Sequence
  Description of Artificial Sequence: Synthetic oligonucleotide
  Sense strand starting at position 2197 of SEQ ID NO: 1889193
cugauucuuguacacauau

SEQ ID NO: 2584253 - RNA, 19 nt, Artificial Sequence
  Description of Artificial Sequence: Synthetic oligonucleotide
  Antisense strand to SEQ ID NO: 2584252
auauguguacaagaaucag

SEQ ID NO: 2584254 - RNA, 19 nt, Artificial Sequence
  Description of Artificial Sequence: Synthetic oligonucleotide
  Sense strand starting at position 2522 of SEQ ID NO: 1889193
ucacaaugacugugacugu

SEQ ID NO: 2584255 - RNA, 19 nt, Artificial Sequence
  Description of Artificial Sequence: Synthetic oligonucleotide
  Antisense strand to SEQ ID NO: 2584254
acagucacagucauuguga

SEQ ID NO: 2584256 - RNA, 19 nt, Artificial Sequence
  Description of Artificial Sequence: Synthetic oligonucleotide
  Sense strand starting at position 2547 of SEQ ID NO: 1889193
cugagaagucccugaggcu

SEQ ID NO: 2584257 - RNA, 19 nt, Artificial Sequence
  Description of Artificial Sequence: Synthetic oligonucleotide
  Antisense strand to SEQ ID NO: 2584256
agccucagggacuucucag

SEQ ID NO: 2584258 - RNA, 19 nt, Artificial Sequence
  Description of Artificial Sequence: Synthetic oligonucleotide
  Sense strand starting at position 2548 of SEQ ID NO: 1889193
ugagaagucccugaggcuu

SEQ ID NO: 2584259 - RNA, 19 nt, Artificial Sequence
  Description of Artificial Sequence: Synthetic oligonucleotide
  Antisense strand to SEQ ID NO: 2584258
aagccucagggacuucuca

SEQ ID NO: 2584260 - RNA, 19 nt, Artificial Sequence
  Description of Artificial Sequence: Synthetic oligonucleotide
  Sense strand starting at position 2585 of SEQ ID NO: 1889193
cguggaggugcguuagcau

SEQ ID NO: 2584261 - RNA, 19 nt, Artificial Sequence
  Description of Artificial Sequence: Synthetic oligonucleotide
  Antisense strand to SEQ ID NO: 2584260
augcuaacgcaccuccacg

SEQ ID NO: 2584262 - RNA, 19 nt, Artificial Sequence
  Description of Artificial Sequence: Synthetic oligonucleotide
  Sense strand starting at position 2682 of SEQ ID NO: 1889193
acgagaauccauugcuuga

SEQ ID NO: 2584263 - RNA, 19 nt, Artificial Sequence
  Description of Artificial Sequence: Synthetic oligonucleotide
  Antisense strand to SEQ ID NO: 2584262
ucaagcaauggauucucgu

SEQ ID NO: 2584264 - RNA, 19 nt, Artificial Sequence
  Description of Artificial Sequence: Synthetic oligonucleotide
  Sense strand starting at position 2684 of SEQ ID NO: 1889193
gagaauccauugcuugagu

SEQ ID NO: 2584265 - RNA, 19 nt, Artificial Sequence
  Description of Artificial Sequence: Synthetic oligonucleotide
  Antisense strand to SEQ ID NO: 2584264
acucaagcaauggauucuc

SEQ ID NO: 2584266 - RNA, 19 nt, Artificial Sequence
  Description of Artificial Sequence: Synthetic oligonucleotide
  Sense strand starting at position 2740 of SEQ ID NO: 1889193
aagcucugagauuguuaaa

SEQ ID NO: 2584267 - RNA, 19 nt, Artificial Sequence
  Description of Artificial Sequence: Synthetic oligonucleotide
  Antisense strand to SEQ ID NO: 2584266
uuuaacaaucucagagcuu

SEQ ID NO: 2584268 - RNA, 19 nt, Artificial Sequence
  Description of Artificial Sequence: Synthetic oligonucleotide
  Sense strand starting at position 2824 of SEQ ID NO: 1889193
gcauaauuccugcaggaug

SEQ ID NO: 2584269 - RNA, 19 nt, Artificial Sequence
  Description of Artificial Sequence: Synthetic oligonucleotide
  Antisense strand to SEQ ID NO: 2584268
cauccugcaggaauuaugc

SEQ ID NO: 2584270 - RNA, 19 nt, Artificial Sequence
  Description of Artificial Sequence: Synthetic oligonucleotide
  Sense strand starting at position 2826 of SEQ ID NO: 1889193
auaauuccugcaggaugaa

SEQ ID NO: 2584271 - RNA, 19 nt, Artificial Sequence
  Description of Artificial Sequence: Synthetic oligonucleotide
  Antisense strand to SEQ ID NO: 2584270
uucauccugcaggaauuau

SEQ ID NO: 2584272 - RNA, 19 nt, Artificial Sequence
  Description of Artificial Sequence: Synthetic oligonucleotide
  Sense strand starting at position 2955 of SEQ ID NO: 1889193
gacugcuucuggcuaggga

SEQ ID NO: 2584273 - RNA, 19 nt, Artificial Sequence
  Description of Artificial Sequence: Synthetic oligonucleotide
  Antisense strand to SEQ ID NO: 2584272
ucccuagccagaagcaguc

SEQ ID NO: 2584274 - RNA, 19 nt, Artificial Sequence
  Description of Artificial Sequence: Synthetic oligonucleotide
  Sense strand starting at position 2956 of SEQ ID NO: 1889193
acugcuucuggcuagggau

SEQ ID NO: 2584275 - RNA, 19 nt, Artificial Sequence
  Description of Artificial Sequence: Synthetic oligonucleotide
  Antisense strand to SEQ ID NO: 2584274
aucccuagccagaagcagu

SEQ ID NO: 2584276 - RNA, 19 nt, Artificial Sequence
  Description of Artificial Sequence: Synthetic oligonucleotide
  Sense strand starting at position 3061 of SEQ ID NO: 1889193
agaauauuugcacguggca

SEQ ID NO: 2584277 - RNA, 19 nt, Artificial Sequence
  Description of Artificial Sequence: Synthetic oligonucleotide
  Antisense strand to SEQ ID NO: 2584276
ugccacgugcaaauauucu

SEQ ID NO: 2584278 - RNA, 19 nt, Artificial Sequence
  Description of Artificial Sequence: Synthetic oligonucleotide
  Sense strand starting at position 3064 of SEQ ID NO: 1889193
auauuugcacguggcaaga

SEQ ID NO: 2584279 - RNA, 19 nt, Artificial Sequence
  Description of Artificial Sequence: Synthetic oligonucleotide
  Antisense strand to SEQ ID NO: 2584278
ucuugccacgugcaaauau

SEQ ID NO: 2584280 - RNA, 19 nt, Artificial Sequence
  Description of Artificial Sequence: Synthetic oligonucleotide
  Sense strand starting at position 3145 of SEQ ID NO: 1889193
guucucuuaggugagacuu

SEQ ID NO: 2584281 - RNA, 19 nt, Artificial Sequence
  Description of Artificial Sequence: Synthetic oligonucleotide
  Antisense strand to SEQ ID NO: 2584280
aagucucaccuaagagaac

SEQ ID NO: 2584282 - RNA, 19 nt, Artificial Sequence
  Description of Artificial Sequence: Synthetic oligonucleotide
  Sense strand starting at position 3293 of SEQ ID NO: 1889193
ggcaguaugaggugugaga

SEQ ID NO: 2584283 - RNA, 19 nt, Artificial Sequence
  Description of Artificial Sequence: Synthetic oligonucleotide
  Antisense strand to SEQ ID NO: 2584282
ucucacaccucauacugcc

SEQ ID NO: 2584284 - RNA, 19 nt, Artificial Sequence
  Description of Artificial Sequence: Synthetic oligonucleotide
  Sense strand starting at position 3304 of SEQ ID NO: 1889193
gugugagaacagugaucca

SEQ ID NO: 2584285 - RNA, 19 nt, Artificial Sequence
  Description of Artificial Sequence: Synthetic oligonucleotide
  Antisense strand to SEQ ID NO: 2584284
uggaucacuguucucacac

SEQ ID NO: 2584286 - RNA, 19 nt, Artificial Sequence
  Description of Artificial Sequence: Synthetic oligonucleotide
  Sense strand starting at position 3307 of SEQ ID NO: 1889193
ugagaacagugauccaacu

SEQ ID NO: 2584287 - RNA, 19 nt, Artificial Sequence
  Description of Artificial Sequence: Synthetic oligonucleotide
  Antisense strand to SEQ ID NO: 2584286
aguuggaucacuguucuca

SEQ ID NO: 2584288 - RNA, 19 nt, Artificial Sequence
  Description of Artificial Sequence: Synthetic oligonucleotide
  Sense strand starting at position 3347 of SEQ ID NO: 1889193
uucugucuuuccuugagag

SEQ ID NO: 2584289 - RNA, 19 nt, Artificial Sequence
  Description of Artificial Sequence: Synthetic oligonucleotide
  Antisense strand to SEQ ID NO: 2584288
cucucaaggaaagacagaa

SEQ ID NO: 2584290 - RNA, 19 nt, Artificial Sequence
  Description of Artificial Sequence: Synthetic oligonucleotide
  Sense strand starting at position 3399 of SEQ ID NO: 1889193
agguuaagaguccgaccau

SEQ ID NO: 2584291 - RNA, 19 nt, Artificial Sequence
  Description of Artificial Sequence: Synthetic oligonucleotide
  Antisense strand to SEQ ID NO: 2584290
auggucggacucuuaaccu

SEQ ID NO: 2584292 - RNA, 19 nt, Artificial Sequence
  Description of Artificial Sequence: Synthetic oligonucleotide
  Sense strand starting at position 3700 of SEQ ID NO: 1889193
caggacaacucugucugua

SEQ ID NO: 2584293 - RNA, 19 nt, Artificial Sequence
  Description of Artificial Sequence: Synthetic oligonucleotide
  Antisense strand to SEQ ID NO: 2584292
uacagacagaguuguccug

SEQ ID NO: 2584294 - RNA, 19 nt, Artificial Sequence
  Description of Artificial Sequence: Synthetic oligonucleotide
  Sense strand starting at position 3831 of SEQ ID NO: 1889193
cuugcaucagcauaaaugu

SEQ ID NO: 2584295 - RNA, 19 nt, Artificial Sequence
  Description of Artificial Sequence: Synthetic oligonucleotide
  Antisense strand to SEQ ID NO: 2584294
acauuuaugcugaugcaag

SEQ ID NO: 2584296 - RNA, 19 nt, Artificial Sequence
  Description of Artificial Sequence: Synthetic oligonucleotide
  Sense strand starting at position 3876 of SEQ ID NO: 1889193
cagcuuggugaaugagacu

SEQ ID NO: 2584297 - RNA, 19 nt, Artificial Sequence
  Description of Artificial Sequence: Synthetic oligonucleotide
  Antisense strand to SEQ ID NO: 2584296
agucucauucaccaagcug

SEQ ID NO: 2584298 - RNA, 19 nt, Artificial Sequence
  Description of Artificial Sequence: Synthetic oligonucleotide
  Sense strand starting at position 3887 of SEQ ID NO: 1889193
augagacuucuguagaggu

SEQ ID NO: 2584299 - RNA, 19 nt, Artificial Sequence
  Description of Artificial Sequence: Synthetic oligonucleotide
  Antisense strand to SEQ ID NO: 2584298
accucuacagaagucucau

SEQ ID NO: 2584300 - RNA, 19 nt, Artificial Sequence
  Description of Artificial Sequence: Synthetic oligonucleotide
  Sense strand starting at position 27 of SEQ ID NO: 1889194
gauugugagcucuaacuag

SEQ ID NO: 2584301 - RNA, 19 nt, Artificial Sequence
  Description of Artificial Sequence: Synthetic oligonucleotide
  Antisense strand to SEQ ID NO: 2584300
cuaguuagagcucacaauc

SEQ ID NO: 2584302 - RNA, 19 nt, Artificial Sequence
  Description of Artificial Sequence: Synthetic oligonucleotide
  Sense strand starting at position 113 of SEQ ID NO: 1889194
ggaggugcaucagucauga

SEQ ID NO: 2584303 - RNA, 19 nt, Artificial Sequence
  Description of Artificial Sequence: Synthetic oligonucleotide
  Antisense strand to SEQ ID NO: 2584302
ucaugacugaugcaccucc

SEQ ID NO: 2584304 - RNA, 19 nt, Artificial Sequence
  Description of Artificial Sequence: Synthetic oligonucleotide
  Sense strand starting at position 149 of SEQ ID NO: 1889194
cuguguuauccacaggauu

SEQ ID NO: 2584305 - RNA, 19 nt, Artificial Sequence
  Description of Artificial Sequence: Synthetic oligonucleotide
  Antisense strand to SEQ ID NO: 2584304
aauccuguggauaacacag

SEQ ID NO: 2584306 - RNA, 19 nt, Artificial Sequence
  Description of Artificial Sequence: Synthetic oligonucleotide
  Sense strand starting at position 162 of SEQ ID NO: 1889194
aggauugucccaugagagu

SEQ ID NO: 2584307 - RNA, 19 nt, Artificial Sequence
  Description of Artificial Sequence: Synthetic oligonucleotide
  Antisense strand to SEQ ID NO: 2584306
acucucaugggacaauccu

SEQ ID NO: 2584308 - RNA, 19 nt, Artificial Sequence
  Description of Artificial Sequence: Synthetic oligonucleotide
  Sense strand starting at position 292 of SEQ ID NO: 1889194
agauauuguagaggugagu

SEQ ID NO: 2584309 - RNA, 19 nt, Artificial Sequence
  Description of Artificial Sequence: Synthetic oligonucleotide
  Antisense strand to SEQ ID NO: 2584308
acucaccucuacaauaucu

SEQ ID NO: 2584310 - RNA, 19 nt, Artificial Sequence
  Description of Artificial Sequence: Synthetic oligonucleotide
  Sense strand starting at position 382 of SEQ ID NO: 1889194
gguggagauaccugcagaa

SEQ ID NO: 2584311 - RNA, 19 nt, Artificial Sequence
  Description of Artificial Sequence: Synthetic oligonucleotide
  Antisense strand to SEQ ID NO: 2584310
uucugcagguaucuccacc

SEQ ID NO: 2584312 - RNA, 19 nt, Artificial Sequence
  Description of Artificial Sequence: Synthetic oligonucleotide
  Sense strand starting at position 1037 of SEQ ID NO: 1889194
aaagacaguguuuaaagca

SEQ ID NO: 2584313 - RNA, 19 nt, Artificial Sequence
  Description of Artificial Sequence: Synthetic oligonucleotide
  Antisense strand to SEQ ID NO: 2584312
ugcuuuaaacacugucuuu

SEQ ID NO: 2584314 - RNA, 19 nt, Artificial Sequence
  Description of Artificial Sequence: Synthetic oligonucleotide
  Sense strand starting at position 1115 of SEQ ID NO: 1889194
ugguguucaggugggaaua

SEQ ID NO: 2584315 - RNA, 19 nt, Artificial Sequence
  Description of Artificial Sequence: Synthetic oligonucleotide
  Antisense strand to SEQ ID NO: 2584314
uauucccaccugaacacca

SEQ ID NO: 2584316 - RNA, 19 nt, Artificial Sequence
  Description of Artificial Sequence: Synthetic oligonucleotide
  Sense strand starting at position 1197 of SEQ ID NO: 1889194
gggcuuucauauucggaga

SEQ ID NO: 2584317 - RNA, 19 nt, Artificial Sequence
  Description of Artificial Sequence: Synthetic oligonucleotide
  Antisense strand to SEQ ID NO: 2584316
ucuccgaauaugaaagccc

SEQ ID NO: 2584318 - RNA, 19 nt, Artificial Sequence
  Description of Artificial Sequence: Synthetic oligonucleotide
  Sense strand starting at position 1232 of SEQ ID NO: 1889194
aauugauucugggugggau

SEQ ID NO: 2584319 - RNA, 19 nt, Artificial Sequence
  Description of Artificial Sequence: Synthetic oligonucleotide
  Antisense strand to SEQ ID NO: 2584318
aucccacccagaaucaauu

SEQ ID NO: 2584320 - RNA, 19 nt, Artificial Sequence
  Description of Artificial Sequence: Synthetic oligonucleotide
  Sense strand starting at position 1233 of SEQ ID NO: 1889194
auugauucugggugggaug

SEQ ID NO: 2584321 - RNA, 19 nt, Artificial Sequence
  Description of Artificial Sequence: Synthetic oligonucleotide
  Antisense strand to SEQ ID NO: 2584320
caucccacccagaaucaau

SEQ ID NO: 2584322 - RNA, 19 nt, Artificial Sequence
  Description of Artificial Sequence: Synthetic oligonucleotide
  Sense strand starting at position 1277 of SEQ ID NO: 1889194
ugacuucuauguuccucau

SEQ ID NO: 2584323 - RNA, 19 nt, Artificial Sequence
  Description of Artificial Sequence: Synthetic oligonucleotide
  Antisense strand to SEQ ID NO: 2584322
augaggaacauagaaguca

SEQ ID NO: 2584324 - RNA, 19 nt, Artificial Sequence
  Description of Artificial Sequence: Synthetic oligonucleotide
  Sense strand starting at position 1499 of SEQ ID NO: 1889194
aucgaauggcugcauaaua

SEQ ID NO: 2584325 - RNA, 19 nt, Artificial Sequence
  Description of Artificial Sequence: Synthetic oligonucleotide
  Antisense strand to SEQ ID NO: 2584324
uauuaugcagccauucgau

SEQ ID NO: 2584326 - RNA, 19 nt, Artificial Sequence
  Description of Artificial Sequence: Synthetic oligonucleotide
  Sense strand starting at position 1749 of SEQ ID NO: 1889194
ugcacuuugcaggagaguu

SEQ ID NO: 2584327 - RNA, 19 nt, Artificial Sequence
  Description of Artificial Sequence: Synthetic oligonucleotide
  Antisense strand to SEQ ID NO: 2584326
aacucuccugcaaagugca

SEQ ID NO: 2584328 - RNA, 19 nt, Artificial Sequence
  Description of Artificial Sequence: Synthetic oligonucleotide
  Sense strand starting at position 2122 of SEQ ID NO: 1889194
guuggucucagguaagauu

SEQ ID NO: 2584329 - RNA, 19 nt, Artificial Sequence
  Description of Artificial Sequence: Synthetic oligonucleotide
  Antisense strand to SEQ ID NO: 2584328
aaucuuaccugagaccaac

SEQ ID NO: 2584330 - RNA, 19 nt, Artificial Sequence
  Description of Artificial Sequence: Synthetic oligonucleotide
  Sense strand starting at position 2193 of SEQ ID NO: 1889194
gugaccugauucuuguaca

SEQ ID NO: 2584331 - RNA, 19 nt, Artificial Sequence
  Description of Artificial Sequence: Synthetic oligonucleotide
  Antisense strand to SEQ ID NO: 2584330
uguacaagaaucaggucac

SEQ ID NO: 2584332 - RNA, 19 nt, Artificial Sequence
  Description of Artificial Sequence: Synthetic oligonucleotide
  Sense strand starting at position 2198 of SEQ ID NO: 1889194
cugauucuuguacacauau

SEQ ID NO: 2584333 - RNA, 19 nt, Artificial Sequence
  Description of Artificial Sequence: Synthetic oligonucleotide
  Antisense strand to SEQ ID NO: 2584332
auauguguacaagaaucag

SEQ ID NO: 2584334 - RNA, 19 nt, Artificial Sequence
  Description of Artificial Sequence: Synthetic oligonucleotide
  Sense strand starting at position 2523 of SEQ ID NO: 1889194
ucacaaugacugugacugu

SEQ ID NO: 2584335 - RNA, 19 nt, Artificial Sequence
  Description of Artificial Sequence: Synthetic oligonucleotide
  Antisense strand to SEQ ID NO: 2584334
acagucacagucauuguga

SEQ ID NO: 2584336 - RNA, 19 nt, Artificial Sequence
  Description of Artificial Sequence: Synthetic oligonucleotide
  Sense strand starting at position 2548 of SEQ ID NO: 1889194
cugagaagucccugaggcu

SEQ ID NO: 2584337 - RNA, 19 nt, Artificial Sequence
  Description of Artificial Sequence: Synthetic oligonucleotide
  Antisense strand to SEQ ID NO: 2584336
agccucagggacuucucag

SEQ ID NO: 2584338 - RNA, 19 nt, Artificial Sequence
  Description of Artificial Sequence: Synthetic oligonucleotide
  Sense strand starting at position 2549 of SEQ ID NO: 1889194
ugagaagucccugaggcuu

SEQ ID NO: 2584339 - RNA, 19 nt, Artificial Sequence
  Description of Artificial Sequence: Synthetic oligonucleotide
  Antisense strand to SEQ ID NO: 2584338
aagccucagggacuucuca

SEQ ID NO: 2584340 - RNA, 19 nt, Artificial Sequence
  Description of Artificial Sequence: Synthetic oligonucleotide
  Sense strand starting at position 2586 of SEQ ID NO: 1889194
cguggaggugcguuagcau

SEQ ID NO: 2584341 - RNA, 19 nt, Artificial Sequence
  Description of Artificial Sequence: Synthetic oligonucleotide
  Antisense strand to SEQ ID NO: 2584340
augcuaacgcaccuccacg

SEQ ID NO: 2584342 - RNA, 19 nt, Artificial Sequence
  Description of Artificial Sequence: Synthetic oligonucleotide
  Sense strand starting at position 2683 of SEQ ID NO: 1889194
acgagaauccauugcuuga

SEQ ID NO: 2584343 - RNA, 19 nt, Artificial Sequence
  Description of Artificial Sequence: Synthetic oligonucleotide
  Antisense strand to SEQ ID NO: 2584342
ucaagcaauggauucucgu

SEQ ID NO: 2584344 - RNA, 19 nt, Artificial Sequence
  Description of Artificial Sequence: Synthetic oligonucleotide
  Sense strand starting at position 2685 of SEQ ID NO: 1889194
gagaauccauugcuugagu

SEQ ID NO: 2584345 - RNA, 19 nt, Artificial Sequence
  Description of Artificial Sequence: Synthetic oligonucleotide
  Antisense strand to SEQ ID NO: 2584344
acucaagcaauggauucuc

SEQ ID NO: 2584346 - RNA, 19 nt, Artificial Sequence
  Description of Artificial Sequence: Synthetic oligonucleotide
  Sense strand starting at position 2741 of SEQ ID NO: 1889194
aagcucugagauuguuaaa

SEQ ID NO: 2584347 - RNA, 19 nt, Artificial Sequence
  Description of Artificial Sequence: Synthetic oligonucleotide
  Antisense strand to SEQ ID NO: 2584346
uuuaacaaucucagagcuu

SEQ ID NO: 2584348 - RNA, 19 nt, Artificial Sequence
  Description of Artificial Sequence: Synthetic oligonucleotide
  Sense strand starting at position 2825 of SEQ ID NO: 1889194
gcauaauuccugcaggaug

SEQ ID NO: 2584349 - RNA, 19 nt, Artificial Sequence
  Description of Artificial Sequence: Synthetic oligonucleotide
  Antisense strand to SEQ ID NO: 2584348
cauccugcaggaauuaugc

SEQ ID NO: 2584350 - RNA, 19 nt, Artificial Sequence
  Description of Artificial Sequence: Synthetic oligonucleotide
  Sense strand starting at position 2827 of SEQ ID NO: 1889194
auaauuccugcaggaugaa

SEQ ID NO: 2584351 - RNA, 19 nt, Artificial Sequence
  Description of Artificial Sequence: Synthetic oligonucleotide
  Antisense strand to SEQ ID NO: 2584350
uucauccugcaggaauuau

SEQ ID NO: 2584352 - RNA, 19 nt, Artificial Sequence
  Description of Artificial Sequence: Synthetic oligonucleotide
  Sense strand starting at position 2956 of SEQ ID NO: 1889194
gacugcuucuggcuaggga

SEQ ID NO: 2584353 - RNA, 19 nt, Artificial Sequence
  Description of Artificial Sequence: Synthetic oligonucleotide
  Antisense strand to SEQ ID NO: 2584352
ucccuagccagaagcaguc

SEQ ID NO: 2584354 - RNA, 19 nt, Artificial Sequence
  Description of Artificial Sequence: Synthetic oligonucleotide
  Sense strand starting at position 2957 of SEQ ID NO: 1889194
acugcuucuggcuagggau

SEQ ID NO: 2584355 - RNA, 19 nt, Artificial Sequence
  Description of Artificial Sequence: Synthetic oligonucleotide
  Antisense strand to SEQ ID NO: 2584354
aucccuagccagaagcagu

SEQ ID NO: 2584356 - RNA, 19 nt, Artificial Sequence
  Description of Artificial Sequence: Synthetic oligonucleotide
  Sense strand starting at position 3062 of SEQ ID NO: 1889194
agaauauuugcacguggca

SEQ ID NO: 2584357 - RNA, 19 nt, Artificial Sequence
  Description of Artificial Sequence: Synthetic oligonucleotide
  Antisense strand to SEQ ID NO: 2584356
ugccacgugcaaauauucu

SEQ ID NO: 2584358 - RNA, 19 nt, Artificial Sequence
  Description of Artificial Sequence: Synthetic oligonucleotide
  Sense strand starting at position 3065 of SEQ ID NO: 1889194
auauuugcacguggcaaga

SEQ ID NO: 2584359 - RNA, 19 nt, Artificial Sequence
  Description of Artificial Sequence: Synthetic oligonucleotide
  Antisense strand to SEQ ID NO: 2584358
ucuugccacgugcaaauau

SEQ ID NO: 2584360 - RNA, 19 nt, Artificial Sequence
  Description of Artificial Sequence: Synthetic oligonucleotide
  Sense strand starting at position 3146 of SEQ ID NO: 1889194
guucucuuaggugagacuu

SEQ ID NO: 2584361 - RNA, 19 nt, Artificial Sequence
  Description of Artificial Sequence: Synthetic oligonucleotide
  Antisense strand to SEQ ID NO: 2584360
aagucucaccuaagagaac

SEQ ID NO: 2584362 - RNA, 19 nt, Artificial Sequence
  Description of Artificial Sequence: Synthetic oligonucleotide
  Sense strand starting at position 3294 of SEQ ID NO: 1889194
ggcaguaugaggugugaga

SEQ ID NO: 2584363 - RNA, 19 nt, Artificial Sequence
  Description of Artificial Sequence: Synthetic oligonucleotide
  Antisense strand to SEQ ID NO: 2584362
ucucacaccucauacugcc

SEQ ID NO: 2584364 - RNA, 19 nt, Artificial Sequence
  Description of Artificial Sequence: Synthetic oligonucleotide
  Sense strand starting at position 3305 of SEQ ID NO: 1889194
gugugagaacagugaucca

SEQ ID NO: 2584365 - RNA, 19 nt, Artificial Sequence
  Description of Artificial Sequence: Synthetic oligonucleotide
  Antisense strand to SEQ ID NO: 2584364
uggaucacuguucucacac

SEQ ID NO: 2584366 - RNA, 19 nt, Artificial Sequence
  Description of Artificial Sequence: Synthetic oligonucleotide
  Sense strand starting at position 3308 of SEQ ID NO: 1889194
ugagaacagugauccaacu

SEQ ID NO: 2584367 - RNA, 19 nt, Artificial Sequence
  Description of Artificial Sequence: Synthetic oligonucleotide
  Antisense strand to SEQ ID NO: 2584366
aguuggaucacuguucuca

SEQ ID NO: 2584368 - RNA, 19 nt, Artificial Sequence
  Description of Artificial Sequence: Synthetic oligonucleotide
  Sense strand starting at position 3348 of SEQ ID NO: 1889194
uucugucuuuccuugagag

SEQ ID NO: 2584369 - RNA, 19 nt, Artificial Sequence
  Description of Artificial Sequence: Synthetic oligonucleotide
  Antisense strand to SEQ ID NO: 2584368
cucucaaggaaagacagaa

SEQ ID NO: 2584370 - RNA, 19 nt, Artificial Sequence
  Description of Artificial Sequence: Synthetic oligonucleotide
  Sense strand starting at position 3400 of SEQ ID NO: 1889194
agguuaagaguccgaccau

SEQ ID NO: 2584371 - RNA, 19 nt, Artificial Sequence
  Description of Artificial Sequence: Synthetic oligonucleotide
  Antisense strand to SEQ ID NO: 2584370
auggucggacucuuaaccu

SEQ ID NO: 2584372 - RNA, 19 nt, Artificial Sequence
  Description of Artificial Sequence: Synthetic oligonucleotide
  Sense strand starting at position 3701 of SEQ ID NO: 1889194
caggacaacucugucugua

SEQ ID NO: 2584373 - RNA, 19 nt, Artificial Sequence
  Description of Artificial Sequence: Synthetic oligonucleotide
  Antisense strand to SEQ ID NO: 2584372
uacagacagaguuguccug

SEQ ID NO: 2584374 - RNA, 19 nt, Artificial Sequence
  Description of Artificial Sequence: Synthetic oligonucleotide
  Sense strand starting at position 3832 of SEQ ID NO: 1889194
cuugcaucagcauaaaugu

SEQ ID NO: 2584375 - RNA, 19 nt, Artificial Sequence
  Description of Artificial Sequence: Synthetic oligonucleotide
  Antisense strand to SEQ ID NO: 2584374
acauuuaugcugaugcaag

SEQ ID NO: 2584376 - RNA, 19 nt, Artificial Sequence
  Description of Artificial Sequence: Synthetic oligonucleotide
  Sense strand starting at position 3877 of SEQ ID NO: 1889194
cagcuuggugaaugagacu

SEQ ID NO: 2584377 - RNA, 19 nt, Artificial Sequence
  Description of Artificial Sequence: Synthetic oligonucleotide
  Antisense strand to SEQ ID NO: 2584376
agucucauucaccaagcug

SEQ ID NO: 2584378 - RNA, 19 nt, Artificial Sequence
  Description of Artificial Sequence: Synthetic oligonucleotide
  Sense strand starting at position 3888 of SEQ ID NO: 1889194
augagacuucuguagaggu

SEQ ID NO: 2584379 - RNA, 19 nt, Artificial Sequence
  Description of Artificial Sequence: Synthetic oligonucleotide
  Antisense strand to SEQ ID NO: 2584378
accucuacagaagucucau

SEQ ID NO: 2584380 - RNA, 19 nt, Artificial Sequence
  Description of Artificial Sequence: Synthetic oligonucleotide
  Sense strand starting at position 26 of SEQ ID NO: 1889195
gauugugagcucuaacuag

SEQ ID NO: 2584381 - RNA, 19 nt, Artificial Sequence
  Description of Artificial Sequence: Synthetic oligonucleotide
  Antisense strand to SEQ ID NO: 2584380
cuaguuagagcucacaauc

SEQ ID NO: 2584382 - RNA, 19 nt, Artificial Sequence
  Description of Artificial Sequence: Synthetic oligonucleotide
  Sense strand starting at position 112 of SEQ ID NO: 1889195
ggaggugcaucagucauga

SEQ ID NO: 2584383 - RNA, 19 nt, Artificial Sequence
  Description of Artificial Sequence: Synthetic oligonucleotide
  Antisense strand to SEQ ID NO: 2584382
ucaugacugaugcaccucc

SEQ ID NO: 2584384 - RNA, 19 nt, Artificial Sequence
  Description of Artificial Sequence: Synthetic oligonucleotide
  Sense strand starting at position 148 of SEQ ID NO: 1889195
cuguguuauccacaggauu

SEQ ID NO: 2584385 - RNA, 19 nt, Artificial Sequence
  Description of Artificial Sequence: Synthetic oligonucleotide
  Antisense strand to SEQ ID NO: 2584384
aauccuguggauaacacag

SEQ ID NO: 2584386 - RNA, 19 nt, Artificial Sequence
  Description of Artificial Sequence: Synthetic oligonucleotide
  Sense strand starting at position 161 of SEQ ID NO: 1889195
aggauugucccaugagagu

SEQ ID NO: 2584387 - RNA, 19 nt, Artificial Sequence
  Description of Artificial Sequence: Synthetic oligonucleotide
  Antisense strand to SEQ ID NO: 2584386
acucucaugggacaauccu

SEQ ID NO: 2584388 - RNA, 19 nt, Artificial Sequence
  Description of Artificial Sequence: Synthetic oligonucleotide
  Sense strand starting at position 278 of SEQ ID NO: 1889195
cucagauaugccuagauau

SEQ ID NO: 2584389 - RNA, 19 nt, Artificial Sequence
  Description of Artificial Sequence: Synthetic oligonucleotide
  Antisense strand to SEQ ID NO: 2584388
auaucuaggcauaucugag

SEQ ID NO: 2584390 - RNA, 19 nt, Artificial Sequence
  Description of Artificial Sequence: Synthetic oligonucleotide
  Sense strand starting at position 291 of SEQ ID NO: 1889195
agauauuguagaggugagu

SEQ ID NO: 2584391 - RNA, 19 nt, Artificial Sequence
  Description of Artificial Sequence: Synthetic oligonucleotide
  Antisense strand to SEQ ID NO: 2584390
acucaccucuacaauaucu

SEQ ID NO: 2584392 - RNA, 19 nt, Artificial Sequence
  Description of Artificial Sequence: Synthetic oligonucleotide
  Sense strand starting at position 381 of SEQ ID NO: 1889195
gguggagauaccugcagaa

SEQ ID NO: 2584393 - RNA, 19 nt, Artificial Sequence
  Description of Artificial Sequence: Synthetic oligonucleotide
  Antisense strand to SEQ ID NO: 2584392
uucugcagguaucuccacc

SEQ ID NO: 2584394 - RNA, 19 nt, Artificial Sequence
  Description of Artificial Sequence: Synthetic oligonucleotide
  Sense strand starting at position 965 of SEQ ID NO: 1889195
gucagauacaggugaguau

SEQ ID NO: 2584395 - RNA, 19 nt, Artificial Sequence
  Description of Artificial Sequence: Synthetic oligonucleotide
  Antisense strand to SEQ ID NO: 2584394
auacucaccuguaucugac

SEQ ID NO: 2584396 - RNA, 19 nt, Artificial Sequence
  Description of Artificial Sequence: Synthetic oligonucleotide
  Sense strand starting at position 1036 of SEQ ID NO: 1889195
aaagacaguguuuaaagca

SEQ ID NO: 2584397 - RNA, 19 nt, Artificial Sequence
  Description of Artificial Sequence: Synthetic oligonucleotide
  Antisense strand to SEQ ID NO: 2584396
ugcuuuaaacacugucuuu

SEQ ID NO: 2584398 - RNA, 19 nt, Artificial Sequence
  Description of Artificial Sequence: Synthetic oligonucleotide
  Sense strand starting at position 1114 of SEQ ID NO: 1889195
ugguguucaggugggaaua

SEQ ID NO: 2584399 - RNA, 19 nt, Artificial Sequence
  Description of Artificial Sequence: Synthetic oligonucleotide
  Antisense strand to SEQ ID NO: 2584398
uauucccaccugaacacca

SEQ ID NO: 2584400 - RNA, 19 nt, Artificial Sequence
  Description of Artificial Sequence: Synthetic oligonucleotide
  Sense strand starting at position 1196 of SEQ ID NO: 1889195
gggcuuucauauucggaga

SEQ ID NO: 2584401 - RNA, 19 nt, Artificial Sequence
  Description of Artificial Sequence: Synthetic oligonucleotide
  Antisense strand to SEQ ID NO: 2584400
ucuccgaauaugaaagccc

SEQ ID NO: 2584402 - RNA, 19 nt, Artificial Sequence
  Description of Artificial Sequence: Synthetic oligonucleotide
  Sense strand starting at position 1231 of SEQ ID NO: 1889195
aauugauucugggugggau

SEQ ID NO: 2584403 - RNA, 19 nt, Artificial Sequence
  Description of Artificial Sequence: Synthetic oligonucleotide
  Antisense strand to SEQ ID NO: 2584402
aucccacccagaaucaauu

SEQ ID NO: 2584404 - RNA, 19 nt, Artificial Sequence
  Description of Artificial Sequence: Synthetic oligonucleotide
  Sense strand starting at position 1232 of SEQ ID NO: 1889195
auugauucugggugggaug

SEQ ID NO: 2584405 - RNA, 19 nt, Artificial Sequence
  Description of Artificial Sequence: Synthetic oligonucleotide
  Antisense strand to SEQ ID NO: 2584404
caucccacccagaaucaau

SEQ ID NO: 2584406 - RNA, 19 nt, Artificial Sequence
  Description of Artificial Sequence: Synthetic oligonucleotide
  Sense strand starting at position 1498 of SEQ ID NO: 1889195
aucgaauggcugcauaaua

SEQ ID NO: 2584407 - RNA, 19 nt, Artificial Sequence
  Description of Artificial Sequence: Synthetic oligonucleotide
  Antisense strand to SEQ ID NO: 2584406
uauuaugcagccauucgau

SEQ ID NO: 2584408 - RNA, 19 nt, Artificial Sequence
  Description of Artificial Sequence: Synthetic oligonucleotide
  Sense strand starting at position 2121 of SEQ ID NO: 1889195
guuggucucagguaagauu

SEQ ID NO: 2584409 - RNA, 19 nt, Artificial Sequence
  Description of Artificial Sequence: Synthetic oligonucleotide
  Antisense strand to SEQ ID NO: 2584408
aaucuuaccugagaccaac

SEQ ID NO: 2584410 - RNA, 19 nt, Artificial Sequence
  Description of Artificial Sequence: Synthetic oligonucleotide
  Sense strand starting at position 2192 of SEQ ID NO: 1889195
gugaccugauucuuguaca

SEQ ID NO: 2584411 - RNA, 19 nt, Artificial Sequence
  Description of Artificial Sequence: Synthetic oligonucleotide
  Antisense strand to SEQ ID NO: 2584410
uguacaagaaucaggucac

SEQ ID NO: 2584412 - RNA, 19 nt, Artificial Sequence
  Description of Artificial Sequence: Synthetic oligonucleotide
  Sense strand starting at position 2197 of SEQ ID NO: 1889195
cugauucuuguacacauau

SEQ ID NO: 2584413 - RNA, 19 nt, Artificial Sequence
  Description of Artificial Sequence: Synthetic oligonucleotide
  Antisense strand to SEQ ID NO: 2584412
auauguguacaagaaucag

SEQ ID NO: 2584414 - RNA, 19 nt, Artificial Sequence
  Description of Artificial Sequence: Synthetic oligonucleotide
  Sense strand starting at position 2522 of SEQ ID NO: 1889195
ucacaaugacugugacugu

SEQ ID NO: 2584415 - RNA, 19 nt, Artificial Sequence
  Description of Artificial Sequence: Synthetic oligonucleotide
  Antisense strand to SEQ ID NO: 2584414
acagucacagucauuguga

SEQ ID NO: 2584416 - RNA, 19 nt, Artificial Sequence
  Description of Artificial Sequence: Synthetic oligonucleotide
  Sense strand starting at position 2547 of SEQ ID NO: 1889195
cugagaagucccugaggcu

SEQ ID NO: 2584417 - RNA, 19 nt, Artificial Sequence
  Description of Artificial Sequence: Synthetic oligonucleotide
  Antisense strand to SEQ ID NO: 2584416
agccucagggacuucucag

SEQ ID NO: 2584418 - RNA, 19 nt, Artificial Sequence
  Description of Artificial Sequence: Synthetic oligonucleotide
  Sense strand starting at position 2548 of SEQ ID NO: 1889195
ugagaagucccugaggcuu

SEQ ID NO: 2584419 - RNA, 19 nt, Artificial Sequence
  Description of Artificial Sequence: Synthetic oligonucleotide
  Antisense strand to SEQ ID NO: 2584418
aagccucagggacuucuca

SEQ ID NO: 2584420 - RNA, 19 nt, Artificial Sequence
  Description of Artificial Sequence: Synthetic oligonucleotide
  Sense strand starting at position 2585 of SEQ ID NO: 1889195
cguggaggugcguuagcau

SEQ ID NO: 2584421 - RNA, 19 nt, Artificial Sequence
  Description of Artificial Sequence: Synthetic oligonucleotide
  Antisense strand to SEQ ID NO: 2584420
augcuaacgcaccuccacg

SEQ ID NO: 2584422 - RNA, 19 nt, Artificial Sequence
  Description of Artificial Sequence: Synthetic oligonucleotide
  Sense strand starting at position 2682 of SEQ ID NO: 1889195
acgagaauccauugcuuga

SEQ ID NO: 2584423 - RNA, 19 nt, Artificial Sequence
  Description of Artificial Sequence: Synthetic oligonucleotide
  Antisense strand to SEQ ID NO: 2584422
ucaagcaauggauucucgu

SEQ ID NO: 2584424 - RNA, 19 nt, Artificial Sequence
  Description of Artificial Sequence: Synthetic oligonucleotide
  Sense strand starting at position 2684 of SEQ ID NO: 1889195
gagaauccauugcuugagu

SEQ ID NO: 2584425 - RNA, 19 nt, Artificial Sequence
  Description of Artificial Sequence: Synthetic oligonucleotide
  Antisense strand to SEQ ID NO: 2584424
acucaagcaauggauucuc

SEQ ID NO: 2584426 - RNA, 19 nt, Artificial Sequence
  Description of Artificial Sequence: Synthetic oligonucleotide
  Sense strand starting at position 2740 of SEQ ID NO: 1889195
aagcucugagauuguuaaa

SEQ ID NO: 2584427 - RNA, 19 nt, Artificial Sequence
  Description of Artificial Sequence: Synthetic oligonucleotide
  Antisense strand to SEQ ID NO: 2584426
uuuaacaaucucagagcuu

SEQ ID NO: 2584428 - RNA, 19 nt, Artificial Sequence
  Description of Artificial Sequence: Synthetic oligonucleotide
  Sense strand starting at position 2824 of SEQ ID NO: 1889195
gcauaauuccugcaggaug

SEQ ID NO: 2584429 - RNA, 19 nt, Artificial Sequence
  Description of Artificial Sequence: Synthetic oligonucleotide
  Antisense strand to SEQ ID NO: 2584428
cauccugcaggaauuaugc

SEQ ID NO: 2584430 - RNA, 19 nt, Artificial Sequence
  Description of Artificial Sequence: Synthetic oligonucleotide
  Sense strand starting at position 2826 of SEQ ID NO: 1889195
auaauuccugcaggaugaa

SEQ ID NO: 2584431 - RNA, 19 nt, Artificial Sequence
  Description of Artificial Sequence: Synthetic oligonucleotide
  Antisense strand to SEQ ID NO: 2584430
uucauccugcaggaauuau

SEQ ID NO: 2584432 - RNA, 19 nt, Artificial Sequence
  Description of Artificial Sequence: Synthetic oligonucleotide
  Sense strand starting at position 2955 of SEQ ID NO: 1889195
gacugcuucuggcuaggga

SEQ ID NO: 2584433 - RNA, 19 nt, Artificial Sequence
  Description of Artificial Sequence: Synthetic oligonucleotide
  Antisense strand to SEQ ID NO: 2584432
ucccuagccagaagcaguc

SEQ ID NO: 2584434 - RNA, 19 nt, Artificial Sequence
  Description of Artificial Sequence: Synthetic oligonucleotide
  Sense strand starting at position 2956 of SEQ ID NO: 1889195
acugcuucuggcuagggau

SEQ ID NO: 2584435 - RNA, 19 nt, Artificial Sequence
  Description of Artificial Sequence: Synthetic oligonucleotide
  Antisense strand to SEQ ID NO: 2584434
aucccuagccagaagcagu

SEQ ID NO: 2584436 - RNA, 19 nt, Artificial Sequence
  Description of Artificial Sequence: Synthetic oligonucleotide
  Sense strand starting at position 3061 of SEQ ID NO: 1889195
agaauauuugcacguggca

SEQ ID NO: 2584437 - RNA, 19 nt, Artificial Sequence
  Description of Artificial Sequence: Synthetic oligonucleotide
  Antisense strand to SEQ ID NO: 2584436
ugccacgugcaaauauucu

SEQ ID NO: 2584438 - RNA, 19 nt, Artificial Sequence
  Description of Artificial Sequence: Synthetic oligonucleotide
  Sense strand starting at position 3064 of SEQ ID NO: 1889195
auauuugcacguggcaaga

SEQ ID NO: 2584439 - RNA, 19 nt, Artificial Sequence
  Description of Artificial Sequence: Synthetic oligonucleotide
  Antisense strand to SEQ ID NO: 2584438
ucuugccacgugcaaauau

SEQ ID NO: 2584440 - RNA, 19 nt, Artificial Sequence
  Description of Artificial Sequence: Synthetic oligonucleotide
  Sense strand starting at position 3145 of SEQ ID NO: 1889195
guucucuuaggugagacuu

SEQ ID NO: 2584441 - RNA, 19 nt, Artificial Sequence
  Description of Artificial Sequence: Synthetic oligonucleotide
  Antisense strand to SEQ ID NO: 2584440
aagucucaccuaagagaac

SEQ ID NO: 2584442 - RNA, 19 nt, Artificial Sequence
  Description of Artificial Sequence: Synthetic oligonucleotide
  Sense strand starting at position 3293 of SEQ ID NO: 1889195
ggcaguaugaggugugaga

SEQ ID NO: 2584443 - RNA, 19 nt, Artificial Sequence
  Description of Artificial Sequence: Synthetic oligonucleotide
  Antisense strand to SEQ ID NO: 2584442
ucucacaccucauacugcc

SEQ ID NO: 2584444 - RNA, 19 nt, Artificial Sequence
  Description of Artificial Sequence: Synthetic oligonucleotide
  Sense strand starting at position 3304 of SEQ ID NO: 1889195
gugugagaacagugaucca

SEQ ID NO: 2584445 - RNA, 19 nt, Artificial Sequence
  Description of Artificial Sequence: Synthetic oligonucleotide
  Antisense strand to SEQ ID NO: 2584444
uggaucacuguucucacac

SEQ ID NO: 2584446 - RNA, 19 nt, Artificial Sequence
  Description of Artificial Sequence: Synthetic oligonucleotide
  Sense strand starting at position 3307 of SEQ ID NO: 1889195
ugagaacagugauccaacu

SEQ ID NO: 2584447 - RNA, 19 nt, Artificial Sequence
  Description of Artificial Sequence: Synthetic oligonucleotide
  Antisense strand to SEQ ID NO: 2584446
aguuggaucacuguucuca

SEQ ID NO: 2584448 - RNA, 19 nt, Artificial Sequence
  Description of Artificial Sequence: Synthetic oligonucleotide
  Sense strand starting at position 3347 of SEQ ID NO: 1889195
uucugucuuuccuugagag

SEQ ID NO: 2584449 - RNA, 19 nt, Artificial Sequence
  Description of Artificial Sequence: Synthetic oligonucleotide
  Antisense strand to SEQ ID NO: 2584448
cucucaaggaaagacagaa

SEQ ID NO: 2584450 - RNA, 19 nt, Artificial Sequence
  Description of Artificial Sequence: Synthetic oligonucleotide
  Sense strand starting at position 3399 of SEQ ID NO: 1889195
agguuaagaguccgaccau

SEQ ID NO: 2584451 - RNA, 19 nt, Artificial Sequence
  Description of Artificial Sequence: Synthetic oligonucleotide
  Antisense strand to SEQ ID NO: 2584450
auggucggacucuuaaccu

SEQ ID NO: 2584452 - RNA, 19 nt, Artificial Sequence
  Description of Artificial Sequence: Synthetic oligonucleotide
  Sense strand starting at position 3700 of SEQ ID NO: 1889195
caggacaacucugucugua

SEQ ID NO: 2584453 - RNA, 19 nt, Artificial Sequence
  Description of Artificial Sequence: Synthetic oligonucleotide
  Antisense strand to SEQ ID NO: 2584452
uacagacagaguuguccug

SEQ ID NO: 2584454 - RNA, 19 nt, Artificial Sequence
  Description of Artificial Sequence: Synthetic oligonucleotide
  Sense strand starting at position 3831 of SEQ ID NO: 1889195
cuugcaucagcauaaaugu

SEQ ID NO: 2584455 - RNA, 19 nt, Artificial Sequence
  Description of Artificial Sequence: Synthetic oligonucleotide
  Antisense strand to SEQ ID NO: 2584454
acauuuaugcugaugcaag

SEQ ID NO: 2584456 - RNA, 19 nt, Artificial Sequence
  Description of Artificial Sequence: Synthetic oligonucleotide
  Sense strand starting at position 3876 of SEQ ID NO: 1889195
cagcuuggugaaugagacu

SEQ ID NO: 2584457 - RNA, 19 nt, Artificial Sequence
  Description of Artificial Sequence: Synthetic oligonucleotide
  Antisense strand to SEQ ID NO: 2584456
agucucauucaccaagcug

SEQ ID NO: 2584458 - RNA, 19 nt, Artificial Sequence
  Description of Artificial Sequence: Synthetic oligonucleotide
  Sense strand starting at position 3887 of SEQ ID NO: 1889195
augagacuucuguagaggu

SEQ ID NO: 2584459 - RNA, 19 nt, Artificial Sequence
  Description of Artificial Sequence: Synthetic oligonucleotide
  Antisense strand to SEQ ID NO: 2584458
accucuacagaagucucau

SEQ ID NO: 2584460 - RNA, 19 nt, Artificial Sequence
  Description of Artificial Sequence: Synthetic oligonucleotide
  Sense strand starting at position 31 of SEQ ID NO: 1889196
ccaggugucagugaaagau

SEQ ID NO: 2584461 - RNA, 19 nt, Artificial Sequence
  Description of Artificial Sequence: Synthetic oligonucleotide
  Antisense strand to SEQ ID NO: 2584460
aucuuucacugacaccugg

SEQ ID NO: 2584462 - RNA, 19 nt, Artificial Sequence
  Description of Artificial Sequence: Synthetic oligonucleotide
  Sense strand starting at position 37 of SEQ ID NO: 1889196
gucagugaaagauagccaa

SEQ ID NO: 2584463 - RNA, 19 nt, Artificial Sequence
  Description of Artificial Sequence: Synthetic oligonucleotide
  Antisense strand to SEQ ID NO: 2584462
uuggcuaucuuucacugac

SEQ ID NO: 2584464 - RNA, 19 nt, Artificial Sequence
  Description of Artificial Sequence: Synthetic oligonucleotide
  Sense strand starting at position 141 of SEQ ID NO: 1889196
guauuacaguauucccaca

SEQ ID NO: 2584465 - RNA, 19 nt, Artificial Sequence
  Description of Artificial Sequence: Synthetic oligonucleotide
  Antisense strand to SEQ ID NO: 2584464
ugugggaauacuguaauac

SEQ ID NO: 2584466 - RNA, 19 nt, Artificial Sequence
  Description of Artificial Sequence: Synthetic oligonucleotide
  Sense strand starting at position 467 of SEQ ID NO: 1889196
cuuugaaaucccugacagc

SEQ ID NO: 2584467 - RNA, 19 nt, Artificial Sequence
  Description of Artificial Sequence: Synthetic oligonucleotide
  Antisense strand to SEQ ID NO: 2584466
gcugucagggauuucaaag

SEQ ID NO: 2584468 - RNA, 19 nt, Artificial Sequence
  Description of Artificial Sequence: Synthetic oligonucleotide
  Sense strand starting at position 486 of SEQ ID NO: 1889196
uaaauaauuuguggagaga

SEQ ID NO: 2584469 - RNA, 19 nt, Artificial Sequence
  Description of Artificial Sequence: Synthetic oligonucleotide
  Antisense strand to SEQ ID NO: 2584468
ucucuccacaaauuauuua

SEQ ID NO: 2584470 - RNA, 19 nt, Artificial Sequence
  Description of Artificial Sequence: Synthetic oligonucleotide
  Sense strand starting at position 519 of SEQ ID NO: 1889196
gcaauagcccaaugaaauu

SEQ ID NO: 2584471 - RNA, 19 nt, Artificial Sequence
  Description of Artificial Sequence: Synthetic oligonucleotide
  Antisense strand to SEQ ID NO: 2584470
aauuucauugggcuauugc

SEQ ID NO: 2584472 - RNA, 19 nt, Artificial Sequence
  Description of Artificial Sequence: Synthetic oligonucleotide
  Sense strand starting at position 538 of SEQ ID NO: 1889196
gucucuccacaaugagaaa

SEQ ID NO: 2584473 - RNA, 19 nt, Artificial Sequence
  Description of Artificial Sequence: Synthetic oligonucleotide
  Antisense strand to SEQ ID NO: 2584472
uuucucauuguggagagac

SEQ ID NO: 2584474 - RNA, 19 nt, Artificial Sequence
  Description of Artificial Sequence: Synthetic oligonucleotide
  Sense strand starting at position 620 of SEQ ID NO: 1889196
cuucucaugcuccaggaau

SEQ ID NO: 2584475 - RNA, 19 nt, Artificial Sequence
  Description of Artificial Sequence: Synthetic oligonucleotide
  Antisense strand to SEQ ID NO: 2584474
auuccuggagcaugagaag

SEQ ID NO: 2584476 - RNA, 19 nt, Artificial Sequence
  Description of Artificial Sequence: Synthetic oligonucleotide
  Sense strand starting at position 747 of SEQ ID NO: 1889196
aguguuuguaaggaaacau

SEQ ID NO: 2584477 - RNA, 19 nt, Artificial Sequence
  Description of Artificial Sequence: Synthetic oligonucleotide
  Antisense strand to SEQ ID NO: 2584476
auguuuccuuacaaacacu

SEQ ID NO: 2584478 - RNA, 19 nt, Artificial Sequence
  Description of Artificial Sequence: Synthetic oligonucleotide
  Sense strand starting at position 759 of SEQ ID NO: 1889196
gaaacauucgugcaacgga

SEQ ID NO: 2584479 - RNA, 19 nt, Artificial Sequence
  Description of Artificial Sequence: Synthetic oligonucleotide
  Antisense strand to SEQ ID NO: 2584478
uccguugcacgaauguuuc

SEQ ID NO: 2584480 - RNA, 19 nt, Artificial Sequence
  Description of Artificial Sequence: Synthetic oligonucleotide
  Sense strand starting at position 772 of SEQ ID NO: 1889196
aacggauucccaugagugu

SEQ ID NO: 2584481 - RNA, 19 nt, Artificial Sequence
  Description of Artificial Sequence: Synthetic oligonucleotide
  Antisense strand to SEQ ID NO: 2584480
acacucaugggaauccguu

SEQ ID NO: 2584482 - RNA, 19 nt, Artificial Sequence
  Description of Artificial Sequence: Synthetic oligonucleotide
  Sense strand starting at position 933 of SEQ ID NO: 1889196
cucccauucggcuaucaua

SEQ ID NO: 2584483 - RNA, 19 nt, Artificial Sequence
  Description of Artificial Sequence: Synthetic oligonucleotide
  Antisense strand to SEQ ID NO: 2584482
uaugauagccgaaugggag

SEQ ID NO: 2584484 - RNA, 19 nt, Artificial Sequence
  Description of Artificial Sequence: Synthetic oligonucleotide
  Sense strand starting at position 1049 of SEQ ID NO: 1889196
ugcugaugcaauuaaggga

SEQ ID NO: 2584485 - RNA, 19 nt, Artificial Sequence
  Description of Artificial Sequence: Synthetic oligonucleotide
  Antisense strand to SEQ ID NO: 2584484
ucccuuaauugcaucagca

SEQ ID NO: 2584486 - RNA, 19 nt, Artificial Sequence
  Description of Artificial Sequence: Synthetic oligonucleotide
  Sense strand starting at position 1199 of SEQ ID NO: 1889196
cccucuuugccagaaugaa

SEQ ID NO: 2584487 - RNA, 19 nt, Artificial Sequence
  Description of Artificial Sequence: Synthetic oligonucleotide
  Antisense strand to SEQ ID NO: 2584486
uucauucuggcaaagaggg

SEQ ID NO: 2584488 - RNA, 19 nt, Artificial Sequence
  Description of Artificial Sequence: Synthetic oligonucleotide
  Sense strand starting at position 1336 of SEQ ID NO: 1889196
gcgugaaacacugagagau

SEQ ID NO: 2584489 - RNA, 19 nt, Artificial Sequence
  Description of Artificial Sequence: Synthetic oligonucleotide
  Antisense strand to SEQ ID NO: 2584488
aucucucaguguuucacgc

SEQ ID NO: 2584490 - RNA, 19 nt, Artificial Sequence
  Description of Artificial Sequence: Synthetic oligonucleotide
  Sense strand starting at position 1785 of SEQ ID NO: 1889196
gugggcuauauguaguaau

SEQ ID NO: 2584491 - RNA, 19 nt, Artificial Sequence
  Description of Artificial Sequence: Synthetic oligonucleotide
  Antisense strand to SEQ ID NO: 2584490
auuacuacauauagcccac

SEQ ID NO: 2584492 - RNA, 19 nt, Artificial Sequence
  Description of Artificial Sequence: Synthetic oligonucleotide
  Sense strand starting at position 1907 of SEQ ID NO: 1889196
cuggaacucuccuugaugu

SEQ ID NO: 2584493 - RNA, 19 nt, Artificial Sequence
  Description of Artificial Sequence: Synthetic oligonucleotide
  Antisense strand to SEQ ID NO: 2584492
acaucaaggagaguuccag

SEQ ID NO: 2584494 - RNA, 19 nt, Artificial Sequence
  Description of Artificial Sequence: Synthetic oligonucleotide
  Sense strand starting at position 1908 of SEQ ID NO: 1889196
uggaacucuccuugauguu

SEQ ID NO: 2584495 - RNA, 19 nt, Artificial Sequence
  Description of Artificial Sequence: Synthetic oligonucleotide
  Antisense strand to SEQ ID NO: 2584494
aacaucaaggagaguucca

SEQ ID NO: 2584496 - RNA, 19 nt, Artificial Sequence
  Description of Artificial Sequence: Synthetic oligonucleotide
  Sense strand starting at position 2031 of SEQ ID NO: 1889196
ggucucauucuccacaaag

SEQ ID NO: 2584497 - RNA, 19 nt, Artificial Sequence
  Description of Artificial Sequence: Synthetic oligonucleotide
  Antisense strand to SEQ ID NO: 2584496
cuuuguggagaaugagacc

SEQ ID NO: 2584498 - RNA, 19 nt, Artificial Sequence
  Description of Artificial Sequence: Synthetic oligonucleotide
  Sense strand starting at position 2121 of SEQ ID NO: 1889196
gugcuuuaagacuagcuca

SEQ ID NO: 2584499 - RNA, 19 nt, Artificial Sequence
  Description of Artificial Sequence: Synthetic oligonucleotide
  Antisense strand to SEQ ID NO: 2584498
ugagcuagucuuaaagcac

SEQ ID NO: 2584500 - RNA, 19 nt, Artificial Sequence
  Description of Artificial Sequence: Synthetic oligonucleotide
  Sense strand starting at position 2301 of SEQ ID NO: 1889196
uggaguucugguggaagag

SEQ ID NO: 2584501 - RNA, 19 nt, Artificial Sequence
  Description of Artificial Sequence: Synthetic oligonucleotide
  Antisense strand to SEQ ID NO: 2584500
cucuuccaccagaacucca

SEQ ID NO: 2584502 - RNA, 19 nt, Artificial Sequence
  Description of Artificial Sequence: Synthetic oligonucleotide
  Sense strand starting at position 2350 of SEQ ID NO: 1889196
ggaaacuguuguucugacu

SEQ ID NO: 2584503 - RNA, 19 nt, Artificial Sequence
  Description of Artificial Sequence: Synthetic oligonucleotide
  Antisense strand to SEQ ID NO: 2584502
agucagaacaacaguuucc

SEQ ID NO: 2584504 - RNA, 19 nt, Artificial Sequence
  Description of Artificial Sequence: Synthetic oligonucleotide
  Sense strand starting at position 2627 of SEQ ID NO: 1889196
ccuauaggcagaugaaguu

SEQ ID NO: 2584505 - RNA, 19 nt, Artificial Sequence
  Description of Artificial Sequence: Synthetic oligonucleotide
  Antisense strand to SEQ ID NO: 2584504
aacuucaucugccuauagg

SEQ ID NO: 2584506 - RNA, 19 nt, Artificial Sequence
  Description of Artificial Sequence: Synthetic oligonucleotide
  Sense strand starting at position 2633 of SEQ ID NO: 1889196
ggcagaugaaguugugaca

SEQ ID NO: 2584507 - RNA, 19 nt, Artificial Sequence
  Description of Artificial Sequence: Synthetic oligonucleotide
  Antisense strand to SEQ ID NO: 2584506
ugucacaacuucaucugcc

SEQ ID NO: 2584508 - RNA, 19 nt, Artificial Sequence
  Description of Artificial Sequence: Synthetic oligonucleotide
  Sense strand starting at position 2975 of SEQ ID NO: 1889196
gcaacagcccauugaaaga

SEQ ID NO: 2584509 - RNA, 19 nt, Artificial Sequence
  Description of Artificial Sequence: Synthetic oligonucleotide
  Antisense strand to SEQ ID NO: 2584508
ucuuucaaugggcuguugc

SEQ ID NO: 2584510 - RNA, 19 nt, Artificial Sequence
  Description of Artificial Sequence: Synthetic oligonucleotide
  Sense strand starting at position 2988 of SEQ ID NO: 1889196
gaaagagacccgugacaau

SEQ ID NO: 2584511 - RNA, 19 nt, Artificial Sequence
  Description of Artificial Sequence: Synthetic oligonucleotide
  Antisense strand to SEQ ID NO: 2584510
auugucacgggucucuuuc

SEQ ID NO: 2584512 - RNA, 19 nt, Artificial Sequence
  Description of Artificial Sequence: Synthetic oligonucleotide
  Sense strand starting at position 3104 of SEQ ID NO: 1889196
cuccgauagaagugggaaa

SEQ ID NO: 2584513 - RNA, 19 nt, Artificial Sequence
  Description of Artificial Sequence: Synthetic oligonucleotide
  Antisense strand to SEQ ID NO: 2584512
uuucccacuucuaucggag

SEQ ID NO: 2584514 - RNA, 19 nt, Artificial Sequence
  Description of Artificial Sequence: Synthetic oligonucleotide
  Sense strand starting at position 3249 of SEQ ID NO: 1889196
uccuuugugaacugggaga

SEQ ID NO: 2584515 - RNA, 19 nt, Artificial Sequence
  Description of Artificial Sequence: Synthetic oligonucleotide
  Antisense strand to SEQ ID NO: 2584514
ucucccaguucacaaagga

SEQ ID NO: 2584516 - RNA, 19 nt, Artificial Sequence
  Description of Artificial Sequence: Synthetic oligonucleotide
  Sense strand starting at position 3254 of SEQ ID NO: 1889196
ugugaacugggagauguuu

SEQ ID NO: 2584517 - RNA, 19 nt, Artificial Sequence
  Description of Artificial Sequence: Synthetic oligonucleotide
  Antisense strand to SEQ ID NO: 2584516
aaacaucucccaguucaca

SEQ ID NO: 2584518 - RNA, 19 nt, Artificial Sequence
  Description of Artificial Sequence: Synthetic oligonucleotide
  Sense strand starting at position 3260 of SEQ ID NO: 1889196
cugggagauguuuaguaug

SEQ ID NO: 2584519 - RNA, 19 nt, Artificial Sequence
  Description of Artificial Sequence: Synthetic oligonucleotide
  Antisense strand to SEQ ID NO: 2584518
cauacuaaacaucucccag

SEQ ID NO: 2584520 - RNA, 19 nt, Artificial Sequence
  Description of Artificial Sequence: Synthetic oligonucleotide
  Sense strand starting at position 3262 of SEQ ID NO: 1889196
gggagauguuuaguaugga

SEQ ID NO: 2584521 - RNA, 19 nt, Artificial Sequence
  Description of Artificial Sequence: Synthetic oligonucleotide
  Antisense strand to SEQ ID NO: 2584520
uccauacuaaacaucuccc

SEQ ID NO: 2584522 - RNA, 19 nt, Artificial Sequence
  Description of Artificial Sequence: Synthetic oligonucleotide
  Sense strand starting at position 3434 of SEQ ID NO: 1889196
caguuuguacucuacaugu

SEQ ID NO: 2584523 - RNA, 19 nt, Artificial Sequence
  Description of Artificial Sequence: Synthetic oligonucleotide
  Antisense strand to SEQ ID NO: 2584522
acauguagaguacaaacug

SEQ ID NO: 2584524 - RNA, 19 nt, Artificial Sequence
  Description of Artificial Sequence: Synthetic oligonucleotide
  Sense strand starting at position 3496 of SEQ ID NO: 1889196
ugugcauggcuugugcaau

SEQ ID NO: 2584525 - RNA, 19 nt, Artificial Sequence
  Description of Artificial Sequence: Synthetic oligonucleotide
  Antisense strand to SEQ ID NO: 2584524
auugcacaagccaugcaca

SEQ ID NO: 2584526 - RNA, 19 nt, Artificial Sequence
  Description of Artificial Sequence: Synthetic oligonucleotide
  Sense strand starting at position 3511 of SEQ ID NO: 1889196
caauuaagaggauguggua

SEQ ID NO: 2584527 - RNA, 19 nt, Artificial Sequence
  Description of Artificial Sequence: Synthetic oligonucleotide
  Antisense strand to SEQ ID NO: 2584526
uaccacauccucuuaauug

SEQ ID NO: 2584528 - RNA, 19 nt, Artificial Sequence
  Description of Artificial Sequence: Synthetic oligonucleotide
  Sense strand starting at position 3539 of SEQ ID NO: 1889196
caaggaacuucugugucau

SEQ ID NO: 2584529 - RNA, 19 nt, Artificial Sequence
  Description of Artificial Sequence: Synthetic oligonucleotide
  Antisense strand to SEQ ID NO: 2584528
augacacagaaguuccuug

SEQ ID NO: 2584530 - RNA, 19 nt, Artificial Sequence
  Description of Artificial Sequence: Synthetic oligonucleotide
  Sense strand starting at position 3540 of SEQ ID NO: 1889196
aaggaacuucugugucauc

SEQ ID NO: 2584531 - RNA, 19 nt, Artificial Sequence
  Description of Artificial Sequence: Synthetic oligonucleotide
  Antisense strand to SEQ ID NO: 2584530
gaugacacagaaguuccuu

SEQ ID NO: 2584532 - RNA, 19 nt, Artificial Sequence
  Description of Artificial Sequence: Synthetic oligonucleotide
  Sense strand starting at position 3617 of SEQ ID NO: 1889196
uguccucuucucuaucuga

SEQ ID NO: 2584533 - RNA, 19 nt, Artificial Sequence
  Description of Artificial Sequence: Synthetic oligonucleotide
  Antisense strand to SEQ ID NO: 2584532
ucagauagagaagaggaca

SEQ ID NO: 2584534 - RNA, 19 nt, Artificial Sequence
  Description of Artificial Sequence: Synthetic oligonucleotide
  Sense strand starting at position 3691 of SEQ ID NO: 1889196
gugcucccucaugacauaa

SEQ ID NO: 2584535 - RNA, 19 nt, Artificial Sequence
  Description of Artificial Sequence: Synthetic oligonucleotide
  Antisense strand to SEQ ID NO: 2584534
uuaugucaugagggagcac

SEQ ID NO: 2584536 - RNA, 19 nt, Artificial Sequence
  Description of Artificial Sequence: Synthetic oligonucleotide
  Sense strand starting at position 3870 of SEQ ID NO: 1889196
aagguaacaccgcaguauu

SEQ ID NO: 2584537 - RNA, 19 nt, Artificial Sequence
  Description of Artificial Sequence: Synthetic oligonucleotide
  Antisense strand to SEQ ID NO: 2584536
aauacugcgguguuaccuu

SEQ ID NO: 2584538 - RNA, 19 nt, Artificial Sequence
  Description of Artificial Sequence: Synthetic oligonucleotide
  Sense strand starting at position 3880 of SEQ ID NO: 1889196
cgcaguauugcagaauaca

SEQ ID NO: 2584539 - RNA, 19 nt, Artificial Sequence
  Description of Artificial Sequence: Synthetic oligonucleotide
  Antisense strand to SEQ ID NO: 2584538
uguauucugcaauacugcg

SEQ ID NO: 2584540 - RNA, 19 nt, Artificial Sequence
  Description of Artificial Sequence: Synthetic oligonucleotide
  Sense strand starting at position 38 of SEQ ID NO: 1889197
gucagugaaagauagccaa

SEQ ID NO: 2584541 - RNA, 19 nt, Artificial Sequence
  Description of Artificial Sequence: Synthetic oligonucleotide
  Antisense strand to SEQ ID NO: 2584540
uuggcuaucuuucacugac

SEQ ID NO: 2584542 - RNA, 19 nt, Artificial Sequence
  Description of Artificial Sequence: Synthetic oligonucleotide
  Sense strand starting at position 142 of SEQ ID NO: 1889197
guauuacaguauucccaca

SEQ ID NO: 2584543 - RNA, 19 nt, Artificial Sequence
  Description of Artificial Sequence: Synthetic oligonucleotide
  Antisense strand to SEQ ID NO: 2584542
ugugggaauacuguaauac

SEQ ID NO: 2584544 - RNA, 19 nt, Artificial Sequence
  Description of Artificial Sequence: Synthetic oligonucleotide
  Sense strand starting at position 469 of SEQ ID NO: 1889197
uuugaaaucccugacagcu

SEQ ID NO: 2584545 - RNA, 19 nt, Artificial Sequence
  Description of Artificial Sequence: Synthetic oligonucleotide
  Antisense strand to SEQ ID NO: 2584544
agcugucagggauuucaaa

SEQ ID NO: 2584546 - RNA, 19 nt, Artificial Sequence
  Description of Artificial Sequence: Synthetic oligonucleotide
  Sense strand starting at position 520 of SEQ ID NO: 1889197
gcaauagcccaaugaaauu

SEQ ID NO: 2584547 - RNA, 19 nt, Artificial Sequence
  Description of Artificial Sequence: Synthetic oligonucleotide
  Antisense strand to SEQ ID NO: 2584546
aauuucauugggcuauugc

SEQ ID NO: 2584548 - RNA, 19 nt, Artificial Sequence
  Description of Artificial Sequence: Synthetic oligonucleotide
  Sense strand starting at position 539 of SEQ ID NO: 1889197
gucucuccacaaugagaaa

SEQ ID NO: 2584549 - RNA, 19 nt, Artificial Sequence
  Description of Artificial Sequence: Synthetic oligonucleotide
  Antisense strand to SEQ ID NO: 2584548
uuucucauuguggagagac

SEQ ID NO: 2584550 - RNA, 19 nt, Artificial Sequence
  Description of Artificial Sequence: Synthetic oligonucleotide
  Sense strand starting at position 621 of SEQ ID NO: 1889197
cuucucaugcuccaggaau

SEQ ID NO: 2584551 - RNA, 19 nt, Artificial Sequence
  Description of Artificial Sequence: Synthetic oligonucleotide
  Antisense strand to SEQ ID NO: 2584550
auuccuggagcaugagaag

SEQ ID NO: 2584552 - RNA, 19 nt, Artificial Sequence
  Description of Artificial Sequence: Synthetic oligonucleotide
  Sense strand starting at position 743 of SEQ ID NO: 1889197
gugacaguguuuguaagga

SEQ ID NO: 2584553 - RNA, 19 nt, Artificial Sequence
  Description of Artificial Sequence: Synthetic oligonucleotide
  Antisense strand to SEQ ID NO: 2584552
uccuuacaaacacugucac

SEQ ID NO: 2584554 - RNA, 19 nt, Artificial Sequence
  Description of Artificial Sequence: Synthetic oligonucleotide
  Sense strand starting at position 748 of SEQ ID NO: 1889197
aguguuuguaaggaaacau

SEQ ID NO: 2584555 - RNA, 19 nt, Artificial Sequence
  Description of Artificial Sequence: Synthetic oligonucleotide
  Antisense strand to SEQ ID NO: 2584554
auguuuccuuacaaacacu

SEQ ID NO: 2584556 - RNA, 19 nt, Artificial Sequence
  Description of Artificial Sequence: Synthetic oligonucleotide
  Sense strand starting at position 760 of SEQ ID NO: 1889197
gaaacauucgugcaacgga

SEQ ID NO: 2584557 - RNA, 19 nt, Artificial Sequence
  Description of Artificial Sequence: Synthetic oligonucleotide
  Antisense strand to SEQ ID NO: 2584556
uccguugcacgaauguuuc

SEQ ID NO: 2584558 - RNA, 19 nt, Artificial Sequence
  Description of Artificial Sequence: Synthetic oligonucleotide
  Sense strand starting at position 773 of SEQ ID NO: 1889197
aacggauucccaugagugu

SEQ ID NO: 2584559 - RNA, 19 nt, Artificial Sequence
  Description of Artificial Sequence: Synthetic oligonucleotide
  Antisense strand to SEQ ID NO: 2584558
acacucaugggaauccguu

SEQ ID NO: 2584560 - RNA, 19 nt, Artificial Sequence
  Description of Artificial Sequence: Synthetic oligonucleotide
  Sense strand starting at position 934 of SEQ ID NO: 1889197
cucccauucggcuaucaua

SEQ ID NO: 2584561 - RNA, 19 nt, Artificial Sequence
  Description of Artificial Sequence: Synthetic oligonucleotide
  Antisense strand to SEQ ID NO: 2584560
uaugauagccgaaugggag

SEQ ID NO: 2584562 - RNA, 19 nt, Artificial Sequence
  Description of Artificial Sequence: Synthetic oligonucleotide
  Sense strand starting at position 1050 of SEQ ID NO: 1889197
ugcugaugcaauuaaggga

SEQ ID NO: 2584563 - RNA, 19 nt, Artificial Sequence
  Description of Artificial Sequence: Synthetic oligonucleotide
  Antisense strand to SEQ ID NO: 2584562
ucccuuaauugcaucagca

SEQ ID NO: 2584564 - RNA, 19 nt, Artificial Sequence
  Description of Artificial Sequence: Synthetic oligonucleotide
  Sense strand starting at position 1786 of SEQ ID NO: 1889197
gugggcuauauguaguaau

SEQ ID NO: 2584565 - RNA, 19 nt, Artificial Sequence
  Description of Artificial Sequence: Synthetic oligonucleotide
  Antisense strand to SEQ ID NO: 2584564
auuacuacauauagcccac

SEQ ID NO: 2584566 - RNA, 19 nt, Artificial Sequence
  Description of Artificial Sequence: Synthetic oligonucleotide
  Sense strand starting at position 2032 of SEQ ID NO: 1889197
ggucucauucuccacaaag

SEQ ID NO: 2584567 - RNA, 19 nt, Artificial Sequence
  Description of Artificial Sequence: Synthetic oligonucleotide
  Antisense strand to SEQ ID NO: 2584566
cuuuguggagaaugagacc

SEQ ID NO: 2584568 - RNA, 19 nt, Artificial Sequence
  Description of Artificial Sequence: Synthetic oligonucleotide
  Sense strand starting at position 2079 of SEQ ID NO: 1889197
uccauuuauugugacacua

SEQ ID NO: 2584569 - RNA, 19 nt, Artificial Sequence
  Description of Artificial Sequence: Synthetic oligonucleotide
  Antisense strand to SEQ ID NO: 2584568
uagugucacaauaaaugga

SEQ ID NO: 2584570 - RNA, 19 nt, Artificial Sequence
  Description of Artificial Sequence: Synthetic oligonucleotide
  Sense strand starting at position 2114 of SEQ ID NO: 1889197
cagaccuggugcuuuaaga

SEQ ID NO: 2584571 - RNA, 19 nt, Artificial Sequence
  Description of Artificial Sequence: Synthetic oligonucleotide
  Antisense strand to SEQ ID NO: 2584570
ucuuaaagcaccaggucug

SEQ ID NO: 2584572 - RNA, 19 nt, Artificial Sequence
  Description of Artificial Sequence: Synthetic oligonucleotide
  Sense strand starting at position 2122 of SEQ ID NO: 1889197
gugcuuuaagacuagcuca

SEQ ID NO: 2584573 - RNA, 19 nt, Artificial Sequence
  Description of Artificial Sequence: Synthetic oligonucleotide
  Antisense strand to SEQ ID NO: 2584572
ugagcuagucuuaaagcac

SEQ ID NO: 2584574 - RNA, 19 nt, Artificial Sequence
  Description of Artificial Sequence: Synthetic oligonucleotide
  Sense strand starting at position 2302 of SEQ ID NO: 1889197
uggaguucugguggaagag

SEQ ID NO: 2584575 - RNA, 19 nt, Artificial Sequence
  Description of Artificial Sequence: Synthetic oligonucleotide
  Antisense strand to SEQ ID NO: 2584574
cucuuccaccagaacucca

SEQ ID NO: 2584576 - RNA, 19 nt, Artificial Sequence
  Description of Artificial Sequence: Synthetic oligonucleotide
  Sense strand starting at position 2351 of SEQ ID NO: 1889197
ggaaacuguuguucugacu

SEQ ID NO: 2584577 - RNA, 19 nt, Artificial Sequence
  Description of Artificial Sequence: Synthetic oligonucleotide
  Antisense strand to SEQ ID NO: 2584576
agucagaacaacaguuucc

SEQ ID NO: 2584578 - RNA, 19 nt, Artificial Sequence
  Description of Artificial Sequence: Synthetic oligonucleotide
  Sense strand starting at position 2428 of SEQ ID NO: 1889197
cagugaguuguugaggguu

SEQ ID NO: 2584579 - RNA, 19 nt, Artificial Sequence
  Description of Artificial Sequence: Synthetic oligonucleotide
  Antisense strand to SEQ ID NO: 2584578
aacccucaacaacucacug

SEQ ID NO: 2584580 - RNA, 19 nt, Artificial Sequence
  Description of Artificial Sequence: Synthetic oligonucleotide
  Sense strand starting at position 2628 of SEQ ID NO: 1889197
ccuauaggcagaugaaguu

SEQ ID NO: 2584581 - RNA, 19 nt, Artificial Sequence
  Description of Artificial Sequence: Synthetic oligonucleotide
  Antisense strand to SEQ ID NO: 2584580
aacuucaucugccuauagg

SEQ ID NO: 2584582 - RNA, 19 nt, Artificial Sequence
  Description of Artificial Sequence: Synthetic oligonucleotide
  Sense strand starting at position 2634 of SEQ ID NO: 1889197
ggcagaugaaguugugaca

SEQ ID NO: 2584583 - RNA, 19 nt, Artificial Sequence
  Description of Artificial Sequence: Synthetic oligonucleotide
  Antisense strand to SEQ ID NO: 2584582
ugucacaacuucaucugcc

SEQ ID NO: 2584584 - RNA, 19 nt, Artificial Sequence
  Description of Artificial Sequence: Synthetic oligonucleotide
  Sense strand starting at position 2989 of SEQ ID NO: 1889197
gaaagagacccgugacaau

SEQ ID NO: 2584585 - RNA, 19 nt, Artificial Sequence
  Description of Artificial Sequence: Synthetic oligonucleotide
  Antisense strand to SEQ ID NO: 2584584
auugucacgggucucuuuc

SEQ ID NO: 2584586 - RNA, 19 nt, Artificial Sequence
  Description of Artificial Sequence: Synthetic oligonucleotide
  Sense strand starting at position 3243 of SEQ ID NO: 1889197
agggucauccuuugugaac

SEQ ID NO: 2584587 - RNA, 19 nt, Artificial Sequence
  Description of Artificial Sequence: Synthetic oligonucleotide
  Antisense strand to SEQ ID NO: 2584586
guucacaaaggaugacccu

SEQ ID NO: 2584588 - RNA, 19 nt, Artificial Sequence
  Description of Artificial Sequence: Synthetic oligonucleotide
  Sense strand starting at position 3244 of SEQ ID NO: 1889197
gggucauccuuugugaacu

SEQ ID NO: 2584589 - RNA, 19 nt, Artificial Sequence
  Description of Artificial Sequence: Synthetic oligonucleotide
  Antisense strand to SEQ ID NO: 2584588
aguucacaaaggaugaccc

SEQ ID NO: 2584590 - RNA, 19 nt, Artificial Sequence
  Description of Artificial Sequence: Synthetic oligonucleotide
  Sense strand starting at position 3250 of SEQ ID NO: 1889197
uccuuugugaacugggaga

SEQ ID NO: 2584591 - RNA, 19 nt, Artificial Sequence
  Description of Artificial Sequence: Synthetic oligonucleotide
  Antisense strand to SEQ ID NO: 2584590
ucucccaguucacaaagga

SEQ ID NO: 2584592 - RNA, 19 nt, Artificial Sequence
  Description of Artificial Sequence: Synthetic oligonucleotide
  Sense strand starting at position 3255 of SEQ ID NO: 1889197
ugugaacugggagauguuu

SEQ ID NO: 2584593 - RNA, 19 nt, Artificial Sequence
  Description of Artificial Sequence: Synthetic oligonucleotide
  Antisense strand to SEQ ID NO: 2584592
aaacaucucccaguucaca

SEQ ID NO: 2584594 - RNA, 19 nt, Artificial Sequence
  Description of Artificial Sequence: Synthetic oligonucleotide
  Sense strand starting at position 3261 of SEQ ID NO: 1889197
cugggagauguuuaguaug

SEQ ID NO: 2584595 - RNA, 19 nt, Artificial Sequence
  Description of Artificial Sequence: Synthetic oligonucleotide
  Antisense strand to SEQ ID NO: 2584594
cauacuaaacaucucccag

SEQ ID NO: 2584596 - RNA, 19 nt, Artificial Sequence
  Description of Artificial Sequence: Synthetic oligonucleotide
  Sense strand starting at position 3263 of SEQ ID NO: 1889197
gggagauguuuaguaugga

SEQ ID NO: 2584597 - RNA, 19 nt, Artificial Sequence
  Description of Artificial Sequence: Synthetic oligonucleotide
  Antisense strand to SEQ ID NO: 2584596
uccauacuaaacaucuccc

SEQ ID NO: 2584598 - RNA, 19 nt, Artificial Sequence
  Description of Artificial Sequence: Synthetic oligonucleotide
  Sense strand starting at position 3266 of SEQ ID NO: 1889197
agauguuuaguauggaaga

SEQ ID NO: 2584599 - RNA, 19 nt, Artificial Sequence
  Description of Artificial Sequence: Synthetic oligonucleotide
  Antisense strand to SEQ ID NO: 2584598
ucuuccauacuaaacaucu

SEQ ID NO: 2584600 - RNA, 19 nt, Artificial Sequence
  Description of Artificial Sequence: Synthetic oligonucleotide
  Sense strand starting at position 3435 of SEQ ID NO: 1889197
caguuuguacucuacaugu

SEQ ID NO: 2584601 - RNA, 19 nt, Artificial Sequence
  Description of Artificial Sequence: Synthetic oligonucleotide
  Antisense strand to SEQ ID NO: 2584600
acauguagaguacaaacug

SEQ ID NO: 2584602 - RNA, 19 nt, Artificial Sequence
  Description of Artificial Sequence: Synthetic oligonucleotide
  Sense strand starting at position 3497 of SEQ ID NO: 1889197
ugugcauggcuugugcaau

SEQ ID NO: 2584603 - RNA, 19 nt, Artificial Sequence
  Description of Artificial Sequence: Synthetic oligonucleotide
  Antisense strand to SEQ ID NO: 2584602
auugcacaagccaugcaca

SEQ ID NO: 2584604 - RNA, 19 nt, Artificial Sequence
  Description of Artificial Sequence: Synthetic oligonucleotide
  Sense strand starting at position 3512 of SEQ ID NO: 1889197
caauuaagaggauguggua

SEQ ID NO: 2584605 - RNA, 19 nt, Artificial Sequence
  Description of Artificial Sequence: Synthetic oligonucleotide
  Antisense strand to SEQ ID NO: 2584604
uaccacauccucuuaauug

SEQ ID NO: 2584606 - RNA, 19 nt, Artificial Sequence
  Description of Artificial Sequence: Synthetic oligonucleotide
  Sense strand starting at position 3540 of SEQ ID NO: 1889197
caaggaacuucugugucau

SEQ ID NO: 2584607 - RNA, 19 nt, Artificial Sequence
  Description of Artificial Sequence: Synthetic oligonucleotide
  Antisense strand to SEQ ID NO: 2584606
augacacagaaguuccuug

SEQ ID NO: 2584608 - RNA, 19 nt, Artificial Sequence
  Description of Artificial Sequence: Synthetic oligonucleotide
  Sense strand starting at position 3541 of SEQ ID NO: 1889197
aaggaacuucugugucauc

SEQ ID NO: 2584609 - RNA, 19 nt, Artificial Sequence
  Description of Artificial Sequence: Synthetic oligonucleotide
  Antisense strand to SEQ ID NO: 2584608
gaugacacagaaguuccuu

SEQ ID NO: 2584610 - RNA, 19 nt, Artificial Sequence
  Description of Artificial Sequence: Synthetic oligonucleotide
  Sense strand starting at position 3618 of SEQ ID NO: 1889197
uguccucuucucuaucuga

SEQ ID NO: 2584611 - RNA, 19 nt, Artificial Sequence
  Description of Artificial Sequence: Synthetic oligonucleotide
  Antisense strand to SEQ ID NO: 2584610
ucagauagagaagaggaca

SEQ ID NO: 2584612 - RNA, 19 nt, Artificial Sequence
  Description of Artificial Sequence: Synthetic oligonucleotide
  Sense strand starting at position 3692 of SEQ ID NO: 1889197
gugcucccucaugacauaa

SEQ ID NO: 2584613 - RNA, 19 nt, Artificial Sequence
  Description of Artificial Sequence: Synthetic oligonucleotide
  Antisense strand to SEQ ID NO: 2584612
uuaugucaugagggagcac

SEQ ID NO: 2584614 - RNA, 19 nt, Artificial Sequence
  Description of Artificial Sequence: Synthetic oligonucleotide
  Sense strand starting at position 3723 of SEQ ID NO: 1889197
gcuggucucauguauugau

SEQ ID NO: 2584615 - RNA, 19 nt, Artificial Sequence
  Description of Artificial Sequence: Synthetic oligonucleotide
  Antisense strand to SEQ ID NO: 2584614
aucaauacaugagaccagc

SEQ ID NO: 2584616 - RNA, 19 nt, Artificial Sequence
  Description of Artificial Sequence: Synthetic oligonucleotide
  Sense strand starting at position 3871 of SEQ ID NO: 1889197
aagguaacaccgcaguauu

SEQ ID NO: 2584617 - RNA, 19 nt, Artificial Sequence
  Description of Artificial Sequence: Synthetic oligonucleotide
  Antisense strand to SEQ ID NO: 2584616
aauacugcgguguuaccuu

SEQ ID NO: 2584618 - RNA, 19 nt, Artificial Sequence
  Description of Artificial Sequence: Synthetic oligonucleotide
  Sense strand starting at position 3881 of SEQ ID NO: 1889197
cgcaguauugcagaauaca

SEQ ID NO: 2584619 - RNA, 19 nt, Artificial Sequence
  Description of Artificial Sequence: Synthetic oligonucleotide
  Antisense strand to SEQ ID NO: 2584618
uguauucugcaauacugcg

SEQ ID NO: 2584620 - RNA, 19 nt, Artificial Sequence
  Description of Artificial Sequence: Synthetic oligonucleotide
  Sense strand starting at position 31 of SEQ ID NO: 1889198
ccaggugucagugaaagau

SEQ ID NO: 2584621 - RNA, 19 nt, Artificial Sequence
  Description of Artificial Sequence: Synthetic oligonucleotide
  Antisense strand to SEQ ID NO: 2584620
aucuuucacugacaccugg

SEQ ID NO: 2584622 - RNA, 19 nt, Artificial Sequence
  Description of Artificial Sequence: Synthetic oligonucleotide
  Sense strand starting at position 37 of SEQ ID NO: 1889198
gucagugaaagauagccaa

SEQ ID NO: 2584623 - RNA, 19 nt, Artificial Sequence
  Description of Artificial Sequence: Synthetic oligonucleotide
  Antisense strand to SEQ ID NO: 2584622
uuggcuaucuuucacugac

SEQ ID NO: 2584624 - RNA, 19 nt, Artificial Sequence
  Description of Artificial Sequence: Synthetic oligonucleotide
  Sense strand starting at position 141 of SEQ ID NO: 1889198
guauuacaguauucccaca

SEQ ID NO: 2584625 - RNA, 19 nt, Artificial Sequence
  Description of Artificial Sequence: Synthetic oligonucleotide
  Antisense strand to SEQ ID NO: 2584624
ugugggaauacuguaauac

SEQ ID NO: 2584626 - RNA, 19 nt, Artificial Sequence
  Description of Artificial Sequence: Synthetic oligonucleotide
  Sense strand starting at position 467 of SEQ ID NO: 1889198
cuuugaaaucccugacagc

SEQ ID NO: 2584627 - RNA, 19 nt, Artificial Sequence
  Description of Artificial Sequence: Synthetic oligonucleotide
  Antisense strand to SEQ ID NO: 2584626
gcugucagggauuucaaag

SEQ ID NO: 2584628 - RNA, 19 nt, Artificial Sequence
  Description of Artificial Sequence: Synthetic oligonucleotide
  Sense strand starting at position 486 of SEQ ID NO: 1889198
uaaauaauuuguggagaga

SEQ ID NO: 2584629 - RNA, 19 nt, Artificial Sequence
  Description of Artificial Sequence: Synthetic oligonucleotide
  Antisense strand to SEQ ID NO: 2584628
ucucuccacaaauuauuua

SEQ ID NO: 2584630 - RNA, 19 nt, Artificial Sequence
  Description of Artificial Sequence: Synthetic oligonucleotide
  Sense strand starting at position 519 of SEQ ID NO: 1889198
gcaauagcccaaugaaauu

SEQ ID NO: 2584631 - RNA, 19 nt, Artificial Sequence
  Description of Artificial Sequence: Synthetic oligonucleotide
  Antisense strand to SEQ ID NO: 2584630
aauuucauugggcuauugc

SEQ ID NO: 2584632 - RNA, 19 nt, Artificial Sequence
  Description of Artificial Sequence: Synthetic oligonucleotide
  Sense strand starting at position 538 of SEQ ID NO: 1889198
gucucuccacaaugagaaa

SEQ ID NO: 2584633 - RNA, 19 nt, Artificial Sequence
  Description of Artificial Sequence: Synthetic oligonucleotide
  Antisense strand to SEQ ID NO: 2584632
uuucucauuguggagagac

SEQ ID NO: 2584634 - RNA, 19 nt, Artificial Sequence
  Description of Artificial Sequence: Synthetic oligonucleotide
  Sense strand starting at position 620 of SEQ ID NO: 1889198
cuucucaugcuccaggaau

SEQ ID NO: 2584635 - RNA, 19 nt, Artificial Sequence
  Description of Artificial Sequence: Synthetic oligonucleotide
  Antisense strand to SEQ ID NO: 2584634
auuccuggagcaugagaag

SEQ ID NO: 2584636 - RNA, 19 nt, Artificial Sequence
  Description of Artificial Sequence: Synthetic oligonucleotide
  Sense strand starting at position 747 of SEQ ID NO: 1889198
aguguuuguaaggaaacau

SEQ ID NO: 2584637 - RNA, 19 nt, Artificial Sequence
  Description of Artificial Sequence: Synthetic oligonucleotide
  Antisense strand to SEQ ID NO: 2584636
auguuuccuuacaaacacu

SEQ ID NO: 2584638 - RNA, 19 nt, Artificial Sequence
  Description of Artificial Sequence: Synthetic oligonucleotide
  Sense strand starting at position 759 of SEQ ID NO: 1889198
gaaacauucgugcaacgga

SEQ ID NO: 2584639 - RNA, 19 nt, Artificial Sequence
  Description of Artificial Sequence: Synthetic oligonucleotide
  Antisense strand to SEQ ID NO: 2584638
uccguugcacgaauguuuc

SEQ ID NO: 2584640 - RNA, 19 nt, Artificial Sequence
  Description of Artificial Sequence: Synthetic oligonucleotide
  Sense strand starting at position 772 of SEQ ID NO: 1889198
aacggauucccaugagugu

SEQ ID NO: 2584641 - RNA, 19 nt, Artificial Sequence
  Description of Artificial Sequence: Synthetic oligonucleotide
  Antisense strand to SEQ ID NO: 2584640
acacucaugggaauccguu

SEQ ID NO: 2584642 - RNA, 19 nt, Artificial Sequence
  Description of Artificial Sequence: Synthetic oligonucleotide
  Sense strand starting at position 933 of SEQ ID NO: 1889198
cucccauucggcuaucaua

SEQ ID NO: 2584643 - RNA, 19 nt, Artificial Sequence
  Description of Artificial Sequence: Synthetic oligonucleotide
  Antisense strand to SEQ ID NO: 2584642
uaugauagccgaaugggag

SEQ ID NO: 2584644 - RNA, 19 nt, Artificial Sequence
  Description of Artificial Sequence: Synthetic oligonucleotide
  Sense strand starting at position 1049 of SEQ ID NO: 1889198
ugcugaugcaauuaaggga

SEQ ID NO: 2584645 - RNA, 19 nt, Artificial Sequence
  Description of Artificial Sequence: Synthetic oligonucleotide
  Antisense strand to SEQ ID NO: 2584644
ucccuuaauugcaucagca

SEQ ID NO: 2584646 - RNA, 19 nt, Artificial Sequence
  Description of Artificial Sequence: Synthetic oligonucleotide
  Sense strand starting at position 1199 of SEQ ID NO: 1889198
cccucuuugccagaaugaa

SEQ ID NO: 2584647 - RNA, 19 nt, Artificial Sequence
  Description of Artificial Sequence: Synthetic oligonucleotide
  Antisense strand to SEQ ID NO: 2584646
uucauucuggcaaagaggg

SEQ ID NO: 2584648 - RNA, 19 nt, Artificial Sequence
  Description of Artificial Sequence: Synthetic oligonucleotide
  Sense strand starting at position 1336 of SEQ ID NO: 1889198
gcgugaaacacugagagau

SEQ ID NO: 2584649 - RNA, 19 nt, Artificial Sequence
  Description of Artificial Sequence: Synthetic oligonucleotide
  Antisense strand to SEQ ID NO: 2584648
aucucucaguguuucacgc

SEQ ID NO: 2584650 - RNA, 19 nt, Artificial Sequence
  Description of Artificial Sequence: Synthetic oligonucleotide
  Sense strand starting at position 1785 of SEQ ID NO: 1889198
gugggcuauauguaguaau

SEQ ID NO: 2584651 - RNA, 19 nt, Artificial Sequence
  Description of Artificial Sequence: Synthetic oligonucleotide
  Antisense strand to SEQ ID NO: 2584650
auuacuacauauagcccac

SEQ ID NO: 2584652 - RNA, 19 nt, Artificial Sequence
  Description of Artificial Sequence: Synthetic oligonucleotide
  Sense strand starting at position 1907 of SEQ ID NO: 1889198
cuggaacucuccuugaugu

SEQ ID NO: 2584653 - RNA, 19 nt, Artificial Sequence
  Description of Artificial Sequence: Synthetic oligonucleotide
  Antisense strand to SEQ ID NO: 2584652
acaucaaggagaguuccag

SEQ ID NO: 2584654 - RNA, 19 nt, Artificial Sequence
  Description of Artificial Sequence: Synthetic oligonucleotide
  Sense strand starting at position 1908 of SEQ ID NO: 1889198
uggaacucuccuugauguu

SEQ ID NO: 2584655 - RNA, 19 nt, Artificial Sequence
  Description of Artificial Sequence: Synthetic oligonucleotide
  Antisense strand to SEQ ID NO: 2584654
aacaucaaggagaguucca

SEQ ID NO: 2584656 - RNA, 19 nt, Artificial Sequence
  Description of Artificial Sequence: Synthetic oligonucleotide
  Sense strand starting at position 2031 of SEQ ID NO: 1889198
ggucucauucuccacaaag

SEQ ID NO: 2584657 - RNA, 19 nt, Artificial Sequence
  Description of Artificial Sequence: Synthetic oligonucleotide
  Antisense strand to SEQ ID NO: 2584656
cuuuguggagaaugagacc

SEQ ID NO: 2584658 - RNA, 19 nt, Artificial Sequence
  Description of Artificial Sequence: Synthetic oligonucleotide
  Sense strand starting at position 2121 of SEQ ID NO: 1889198
gugcuuuaagacuagcuca

SEQ ID NO: 2584659 - RNA, 19 nt, Artificial Sequence
  Description of Artificial Sequence: Synthetic oligonucleotide
  Antisense strand to SEQ ID NO: 2584658
ugagcuagucuuaaagcac

SEQ ID NO: 2584660 - RNA, 19 nt, Artificial Sequence
  Description of Artificial Sequence: Synthetic oligonucleotide
  Sense strand starting at position 2301 of SEQ ID NO: 1889198
uggaguucugguggaagag

SEQ ID NO: 2584661 - RNA, 19 nt, Artificial Sequence
  Description of Artificial Sequence: Synthetic oligonucleotide
  Antisense strand to SEQ ID NO: 2584660
cucuuccaccagaacucca

SEQ ID NO: 2584662 - RNA, 19 nt, Artificial Sequence
  Description of Artificial Sequence: Synthetic oligonucleotide
  Sense strand starting at position 2350 of SEQ ID NO: 1889198
ggaaacuguuguucugacu

SEQ ID NO: 2584663 - RNA, 19 nt, Artificial Sequence
  Description of Artificial Sequence: Synthetic oligonucleotide
  Antisense strand to SEQ ID NO: 2584662
agucagaacaacaguuucc

SEQ ID NO: 2584664 - RNA, 19 nt, Artificial Sequence
  Description of Artificial Sequence: Synthetic oligonucleotide
  Sense strand starting at position 2627 of SEQ ID NO: 1889198
ccuauaggcagaugaaguu

SEQ ID NO: 2584665 - RNA, 19 nt, Artificial Sequence
  Description of Artificial Sequence: Synthetic oligonucleotide
  Antisense strand to SEQ ID NO: 2584664
aacuucaucugccuauagg

SEQ ID NO: 2584666 - RNA, 19 nt, Artificial Sequence
  Description of Artificial Sequence: Synthetic oligonucleotide
  Sense strand starting at position 2633 of SEQ ID NO: 1889198
ggcagaugaaguugugaca

SEQ ID NO: 2584667 - RNA, 19 nt, Artificial Sequence
  Description of Artificial Sequence: Synthetic oligonucleotide
  Antisense strand to SEQ ID NO: 2584666
ugucacaacuucaucugcc

SEQ ID NO: 2584668 - RNA, 19 nt, Artificial Sequence
  Description of Artificial Sequence: Synthetic oligonucleotide
  Sense strand starting at position 2975 of SEQ ID NO: 1889198
gcaacagcccauugaaaga

SEQ ID NO: 2584669 - RNA, 19 nt, Artificial Sequence
  Description of Artificial Sequence: Synthetic oligonucleotide
  Antisense strand to SEQ ID NO: 2584668
ucuuucaaugggcuguugc

SEQ ID NO: 2584670 - RNA, 19 nt, Artificial Sequence
  Description of Artificial Sequence: Synthetic oligonucleotide
  Sense strand starting at position 2988 of SEQ ID NO: 1889198
gaaagagacccgugacaau

SEQ ID NO: 2584671 - RNA, 19 nt, Artificial Sequence
  Description of Artificial Sequence: Synthetic oligonucleotide
  Antisense strand to SEQ ID NO: 2584670
auugucacgggucucuuuc

SEQ ID NO: 2584672 - RNA, 19 nt, Artificial Sequence
  Description of Artificial Sequence: Synthetic oligonucleotide
  Sense strand starting at position 3104 of SEQ ID NO: 1889198
cuccgauagaagugggaaa

SEQ ID NO: 2584673 - RNA, 19 nt, Artificial Sequence
  Description of Artificial Sequence: Synthetic oligonucleotide
  Antisense strand to SEQ ID NO: 2584672
uuucccacuucuaucggag

SEQ ID NO: 2584674 - RNA, 19 nt, Artificial Sequence
  Description of Artificial Sequence: Synthetic oligonucleotide
  Sense strand starting at position 3249 of SEQ ID NO: 1889198
uccuuugugaacugggaga

SEQ ID NO: 2584675 - RNA, 19 nt, Artificial Sequence
  Description of Artificial Sequence: Synthetic oligonucleotide
  Antisense strand to SEQ ID NO: 2584674
ucucccaguucacaaagga

SEQ ID NO: 2584676 - RNA, 19 nt, Artificial Sequence
  Description of Artificial Sequence: Synthetic oligonucleotide
  Sense strand starting at position 3254 of SEQ ID NO: 1889198
ugugaacugggagauguuu

SEQ ID NO: 2584677 - RNA, 19 nt, Artificial Sequence
  Description of Artificial Sequence: Synthetic oligonucleotide
  Antisense strand to SEQ ID NO: 2584676
aaacaucucccaguucaca

SEQ ID NO: 2584678 - RNA, 19 nt, Artificial Sequence
  Description of Artificial Sequence: Synthetic oligonucleotide
  Sense strand starting at position 3260 of SEQ ID NO: 1889198
cugggagauguuuaguaug

SEQ ID NO: 2584679 - RNA, 19 nt, Artificial Sequence
  Description of Artificial Sequence: Synthetic oligonucleotide
  Antisense strand to SEQ ID NO: 2584678
cauacuaaacaucucccag

SEQ ID NO: 2584680 - RNA, 19 nt, Artificial Sequence
  Description of Artificial Sequence: Synthetic oligonucleotide
  Sense strand starting at position 3262 of SEQ ID NO: 1889198
gggagauguuuaguaugga

SEQ ID NO: 2584681 - RNA, 19 nt, Artificial Sequence
  Description of Artificial Sequence: Synthetic oligonucleotide
  Antisense strand to SEQ ID NO: 2584680
uccauacuaaacaucuccc

SEQ ID NO: 2584682 - RNA, 19 nt, Artificial Sequence
  Description of Artificial Sequence: Synthetic oligonucleotide
  Sense strand starting at position 3434 of SEQ ID NO: 1889198
caguuuguacucuacaugu

SEQ ID NO: 2584683 - RNA, 19 nt, Artificial Sequence
  Description of Artificial Sequence: Synthetic oligonucleotide
  Antisense strand to SEQ ID NO: 2584682
acauguagaguacaaacug

SEQ ID NO: 2584684 - RNA, 19 nt, Artificial Sequence
  Description of Artificial Sequence: Synthetic oligonucleotide
  Sense strand starting at position 3496 of SEQ ID NO: 1889198
ugugcauggcuugugcaau

SEQ ID NO: 2584685 - RNA, 19 nt, Artificial Sequence
  Description of Artificial Sequence: Synthetic oligonucleotide
  Antisense strand to SEQ ID NO: 2584684
auugcacaagccaugcaca

SEQ ID NO: 2584686 - RNA, 19 nt, Artificial Sequence
  Description of Artificial Sequence: Synthetic oligonucleotide
  Sense strand starting at position 3511 of SEQ ID NO: 1889198
caauuaagaggauguggua

SEQ ID NO: 2584687 - RNA, 19 nt, Artificial Sequence
  Description of Artificial Sequence: Synthetic oligonucleotide
  Antisense strand to SEQ ID NO: 2584686
uaccacauccucuuaauug

SEQ ID NO: 2584688 - RNA, 19 nt, Artificial Sequence
  Description of Artificial Sequence: Synthetic oligonucleotide
  Sense strand starting at position 3539 of SEQ ID NO: 1889198
caaggaacuucugugucau

SEQ ID NO: 2584689 - RNA, 19 nt, Artificial Sequence
  Description of Artificial Sequence: Synthetic oligonucleotide
  Antisense strand to SEQ ID NO: 2584688
augacacagaaguuccuug

SEQ ID NO: 2584690 - RNA, 19 nt, Artificial Sequence
  Description of Artificial Sequence: Synthetic oligonucleotide
  Sense strand starting at position 3540 of SEQ ID NO: 1889198
aaggaacuucugugucauc

SEQ ID NO: 2584691 - RNA, 19 nt, Artificial Sequence
  Description of Artificial Sequence: Synthetic oligonucleotide
  Antisense strand to SEQ ID NO: 2584690
gaugacacagaaguuccuu

SEQ ID NO: 2584692 - RNA, 19 nt, Artificial Sequence
  Description of Artificial Sequence: Synthetic oligonucleotide
  Sense strand starting at position 3617 of SEQ ID NO: 1889198
uguccucuucucuaucuga

SEQ ID NO: 2584693 - RNA, 19 nt, Artificial Sequence
  Description of Artificial Sequence: Synthetic oligonucleotide
  Antisense strand to SEQ ID NO: 2584692
ucagauagagaagaggaca

SEQ ID NO: 2584694 - RNA, 19 nt, Artificial Sequence
  Description of Artificial Sequence: Synthetic oligonucleotide
  Sense strand starting at position 3691 of SEQ ID NO: 1889198
gugcucccucaugacauaa

SEQ ID NO: 2584695 - RNA, 19 nt, Artificial Sequence
  Description of Artificial Sequence: Synthetic oligonucleotide
  Antisense strand to SEQ ID NO: 2584694
uuaugucaugagggagcac

SEQ ID NO: 2584696 - RNA, 19 nt, Artificial Sequence
  Description of Artificial Sequence: Synthetic oligonucleotide
  Sense strand starting at position 3870 of SEQ ID NO: 1889198
aagguaacaccgcaguauu

SEQ ID NO: 2584697 - RNA, 19 nt, Artificial Sequence
  Description of Artificial Sequence: Synthetic oligonucleotide
  Antisense strand to SEQ ID NO: 2584696
aauacugcgguguuaccuu

SEQ ID NO: 2584698 - RNA, 19 nt, Artificial Sequence
  Description of Artificial Sequence: Synthetic oligonucleotide
  Sense strand starting at position 3880 of SEQ ID NO: 1889198
cgcaguauugcagaauaca

SEQ ID NO: 2584699 - RNA, 19 nt, Artificial Sequence
  Description of Artificial Sequence: Synthetic oligonucleotide
  Antisense strand to SEQ ID NO: 2584698
uguauucugcaauacugcg

SEQ ID NO: 2584700 - RNA, 19 nt, Artificial Sequence
  Description of Artificial Sequence: Synthetic oligonucleotide
  Sense strand starting at position 38 of SEQ ID NO: 1889199
gucagugaaagauagccaa

SEQ ID NO: 2584701 - RNA, 19 nt, Artificial Sequence
  Description of Artificial Sequence: Synthetic oligonucleotide
  Antisense strand to SEQ ID NO: 2584700
uuggcuaucuuucacugac

SEQ ID NO: 2584702 - RNA, 19 nt, Artificial Sequence
  Description of Artificial Sequence: Synthetic oligonucleotide
  Sense strand starting at position 142 of SEQ ID NO: 1889199
guauuacaguauucccaca

SEQ ID NO: 2584703 - RNA, 19 nt, Artificial Sequence
  Description of Artificial Sequence: Synthetic oligonucleotide
  Antisense strand to SEQ ID NO: 2584702
ugugggaauacuguaauac

SEQ ID NO: 2584704 - RNA, 19 nt, Artificial Sequence
  Description of Artificial Sequence: Synthetic oligonucleotide
  Sense strand starting at position 469 of SEQ ID NO: 1889199
uuugaaaucccugacagcu

SEQ ID NO: 2584705 - RNA, 19 nt, Artificial Sequence
  Description of Artificial Sequence: Synthetic oligonucleotide
  Antisense strand to SEQ ID NO: 2584704
agcugucagggauuucaaa

SEQ ID NO: 2584706 - RNA, 19 nt, Artificial Sequence
  Description of Artificial Sequence: Synthetic oligonucleotide
  Sense strand starting at position 520 of SEQ ID NO: 1889199
gcaauagcccaaugaaauu

SEQ ID NO: 2584707 - RNA, 19 nt, Artificial Sequence
  Description of Artificial Sequence: Synthetic oligonucleotide
  Antisense strand to SEQ ID NO: 2584706
aauuucauugggcuauugc

SEQ ID NO: 2584708 - RNA, 19 nt, Artificial Sequence
  Description of Artificial Sequence: Synthetic oligonucleotide
  Sense strand starting at position 539 of SEQ ID NO: 1889199
gucucuccacaaugagaaa

SEQ ID NO: 2584709 - RNA, 19 nt, Artificial Sequence
  Description of Artificial Sequence: Synthetic oligonucleotide
  Antisense strand to SEQ ID NO: 2584708
uuucucauuguggagagac

SEQ ID NO: 2584710 - RNA, 19 nt, Artificial Sequence
  Description of Artificial Sequence: Synthetic oligonucleotide
  Sense strand starting at position 621 of SEQ ID NO: 1889199
cuucucaugcuccaggaau

SEQ ID NO: 2584711 - RNA, 19 nt, Artificial Sequence
  Description of Artificial Sequence: Synthetic oligonucleotide
  Antisense strand to SEQ ID NO: 2584710
auuccuggagcaugagaag

SEQ ID NO: 2584712 - RNA, 19 nt, Artificial Sequence
  Description of Artificial Sequence: Synthetic oligonucleotide
  Sense strand starting at position 743 of SEQ ID NO: 1889199
gugacaguguuuguaagga

SEQ ID NO: 2584713 - RNA, 19 nt, Artificial Sequence
  Description of Artificial Sequence: Synthetic oligonucleotide
  Antisense strand to SEQ ID NO: 2584712
uccuuacaaacacugucac

SEQ ID NO: 2584714 - RNA, 19 nt, Artificial Sequence
  Description of Artificial Sequence: Synthetic oligonucleotide
  Sense strand starting at position 748 of SEQ ID NO: 1889199
aguguuuguaaggaaacau

SEQ ID NO: 2584715 - RNA, 19 nt, Artificial Sequence
  Description of Artificial Sequence: Synthetic oligonucleotide
  Antisense strand to SEQ ID NO: 2584714
auguuuccuuacaaacacu

SEQ ID NO: 2584716 - RNA, 19 nt, Artificial Sequence
  Description of Artificial Sequence: Synthetic oligonucleotide
  Sense strand starting at position 760 of SEQ ID NO: 1889199
gaaacauucgugcaacgga

SEQ ID NO: 2584717 - RNA, 19 nt, Artificial Sequence
  Description of Artificial Sequence: Synthetic oligonucleotide
  Antisense strand to SEQ ID NO: 2584716
uccguugcacgaauguuuc

SEQ ID NO: 2584718 - RNA, 19 nt, Artificial Sequence
  Description of Artificial Sequence: Synthetic oligonucleotide
  Sense strand starting at position 773 of SEQ ID NO: 1889199
aacggauucccaugagugu

SEQ ID NO: 2584719 - RNA, 19 nt, Artificial Sequence
  Description of Artificial Sequence: Synthetic oligonucleotide
  Antisense strand to SEQ ID NO: 2584718
acacucaugggaauccguu

SEQ ID NO: 2584720 - RNA, 19 nt, Artificial Sequence
  Description of Artificial Sequence: Synthetic oligonucleotide
  Sense strand starting at position 934 of SEQ ID NO: 1889199
cucccauucggcuaucaua

SEQ ID NO: 2584721 - RNA, 19 nt, Artificial Sequence
  Description of Artificial Sequence: Synthetic oligonucleotide
  Antisense strand to SEQ ID NO: 2584720
uaugauagccgaaugggag

SEQ ID NO: 2584722 - RNA, 19 nt, Artificial Sequence
  Description of Artificial Sequence: Synthetic oligonucleotide
  Sense strand starting at position 1050 of SEQ ID NO: 1889199
ugcugaugcaauuaaggga

SEQ ID NO: 2584723 - RNA, 19 nt, Artificial Sequence
  Description of Artificial Sequence: Synthetic oligonucleotide
  Antisense strand to SEQ ID NO: 2584722
ucccuuaauugcaucagca

SEQ ID NO: 2584724 - RNA, 19 nt, Artificial Sequence
  Description of Artificial Sequence: Synthetic oligonucleotide
  Sense strand starting at position 1786 of SEQ ID NO: 1889199
gugggcuauauguaguaau

SEQ ID NO: 2584725 - RNA, 19 nt, Artificial Sequence
  Description of Artificial Sequence: Synthetic oligonucleotide
  Antisense strand to SEQ ID NO: 2584724
auuacuacauauagcccac

SEQ ID NO: 2584726 - RNA, 19 nt, Artificial Sequence
  Description of Artificial Sequence: Synthetic oligonucleotide
  Sense strand starting at position 2032 of SEQ ID NO: 1889199
ggucucauucuccacaaag

SEQ ID NO: 2584727 - RNA, 19 nt, Artificial Sequence
  Description of Artificial Sequence: Synthetic oligonucleotide
  Antisense strand to SEQ ID NO: 2584726
cuuuguggagaaugagacc

SEQ ID NO: 2584728 - RNA, 19 nt, Artificial Sequence
  Description of Artificial Sequence: Synthetic oligonucleotide
  Sense strand starting at position 2079 of SEQ ID NO: 1889199
uccauuuauugugacacua

SEQ ID NO: 2584729 - RNA, 19 nt, Artificial Sequence
  Description of Artificial Sequence: Synthetic oligonucleotide
  Antisense strand to SEQ ID NO: 2584728
uagugucacaauaaaugga

SEQ ID NO: 2584730 - RNA, 19 nt, Artificial Sequence
  Description of Artificial Sequence: Synthetic oligonucleotide
  Sense strand starting at position 2114 of SEQ ID NO: 1889199
cagaccuggugcuuuaaga

SEQ ID NO: 2584731 - RNA, 19 nt, Artificial Sequence
  Description of Artificial Sequence: Synthetic oligonucleotide
  Antisense strand to SEQ ID NO: 2584730
ucuuaaagcaccaggucug

SEQ ID NO: 2584732 - RNA, 19 nt, Artificial Sequence
  Description of Artificial Sequence: Synthetic oligonucleotide
  Sense strand starting at position 2122 of SEQ ID NO: 1889199
gugcuuuaagacuagcuca

SEQ ID NO: 2584733 - RNA, 19 nt, Artificial Sequence
  Description of Artificial Sequence: Synthetic oligonucleotide
  Antisense strand to SEQ ID NO: 2584732
ugagcuagucuuaaagcac

SEQ ID NO: 2584734 - RNA, 19 nt, Artificial Sequence
  Description of Artificial Sequence: Synthetic oligonucleotide
  Sense strand starting at position 2302 of SEQ ID NO: 1889199
uggaguucugguggaagag

SEQ ID NO: 2584735 - RNA, 19 nt, Artificial Sequence
  Description of Artificial Sequence: Synthetic oligonucleotide
  Antisense strand to SEQ ID NO: 2584734
cucuuccaccagaacucca

SEQ ID NO: 2584736 - RNA, 19 nt, Artificial Sequence
  Description of Artificial Sequence: Synthetic oligonucleotide
  Sense strand starting at position 2351 of SEQ ID NO: 1889199
ggaaacuguuguucugacu

SEQ ID NO: 2584737 - RNA, 19 nt, Artificial Sequence
  Description of Artificial Sequence: Synthetic oligonucleotide
  Antisense strand to SEQ ID NO: 2584736
agucagaacaacaguuucc

SEQ ID NO: 2584738 - RNA, 19 nt, Artificial Sequence
  Description of Artificial Sequence: Synthetic oligonucleotide
  Sense strand starting at position 2428 of SEQ ID NO: 1889199
cagugaguuguugaggguu

SEQ ID NO: 2584739 - RNA, 19 nt, Artificial Sequence
  Description of Artificial Sequence: Synthetic oligonucleotide
  Antisense strand to SEQ ID NO: 2584738
aacccucaacaacucacug

SEQ ID NO: 2584740 - RNA, 19 nt, Artificial Sequence
  Description of Artificial Sequence: Synthetic oligonucleotide
  Sense strand starting at position 2628 of SEQ ID NO: 1889199
ccuauaggcagaugaaguu

SEQ ID NO: 2584741 - RNA, 19 nt, Artificial Sequence
  Description of Artificial Sequence: Synthetic oligonucleotide
  Antisense strand to SEQ ID NO: 2584740
aacuucaucugccuauagg

SEQ ID NO: 2584742 - RNA, 19 nt, Artificial Sequence
  Description of Artificial Sequence: Synthetic oligonucleotide
  Sense strand starting at position 2634 of SEQ ID NO: 1889199
ggcagaugaaguugugaca

SEQ ID NO: 2584743 - RNA, 19 nt, Artificial Sequence
  Description of Artificial Sequence: Synthetic oligonucleotide
  Antisense strand to SEQ ID NO: 2584742
ugucacaacuucaucugcc

SEQ ID NO: 2584744 - RNA, 19 nt, Artificial Sequence
  Description of Artificial Sequence: Synthetic oligonucleotide
  Sense strand starting at position 2989 of SEQ ID NO: 1889199
gaaagagacccgugacaau

SEQ ID NO: 2584745 - RNA, 19 nt, Artificial Sequence
  Description of Artificial Sequence: Synthetic oligonucleotide
  Antisense strand to SEQ ID NO: 2584744
auugucacgggucucuuuc

SEQ ID NO: 2584746 - RNA, 19 nt, Artificial Sequence
  Description of Artificial Sequence: Synthetic oligonucleotide
  Sense strand starting at position 3243 of SEQ ID NO: 1889199
agggucauccuuugugaac

SEQ ID NO: 2584747 - RNA, 19 nt, Artificial Sequence
  Description of Artificial Sequence: Synthetic oligonucleotide
  Antisense strand to SEQ ID NO: 2584746
guucacaaaggaugacccu

SEQ ID NO: 2584748 - RNA, 19 nt, Artificial Sequence
  Description of Artificial Sequence: Synthetic oligonucleotide
  Sense strand starting at position 3244 of SEQ ID NO: 1889199
gggucauccuuugugaacu

SEQ ID NO: 2584749 - RNA, 19 nt, Artificial Sequence
  Description of Artificial Sequence: Synthetic oligonucleotide
  Antisense strand to SEQ ID NO: 2584748
aguucacaaaggaugaccc

SEQ ID NO: 2584750 - RNA, 19 nt, Artificial Sequence
  Description of Artificial Sequence: Synthetic oligonucleotide
  Sense strand starting at position 3250 of SEQ ID NO: 1889199
uccuuugugaacugggaga

SEQ ID NO: 2584751 - RNA, 19 nt, Artificial Sequence
  Description of Artificial Sequence: Synthetic oligonucleotide
  Antisense strand to SEQ ID NO: 2584750
ucucccaguucacaaagga

SEQ ID NO: 2584752 - RNA, 19 nt, Artificial Sequence
  Description of Artificial Sequence: Synthetic oligonucleotide
  Sense strand starting at position 3255 of SEQ ID NO: 1889199
ugugaacugggagauguuu

SEQ ID NO: 2584753 - RNA, 19 nt, Artificial Sequence
  Description of Artificial Sequence: Synthetic oligonucleotide
  Antisense strand to SEQ ID NO: 2584752
aaacaucucccaguucaca

SEQ ID NO: 2584754 - RNA, 19 nt, Artificial Sequence
  Description of Artificial Sequence: Synthetic oligonucleotide
  Sense strand starting at position 3261 of SEQ ID NO: 1889199
cugggagauguuuaguaug

SEQ ID NO: 2584755 - RNA, 19 nt, Artificial Sequence
  Description of Artificial Sequence: Synthetic oligonucleotide
  Antisense strand to SEQ ID NO: 2584754
cauacuaaacaucucccag

SEQ ID NO: 2584756 - RNA, 19 nt, Artificial Sequence
  Description of Artificial Sequence: Synthetic oligonucleotide
  Sense strand starting at position 3263 of SEQ ID NO: 1889199
gggagauguuuaguaugga

SEQ ID NO: 2584757 - RNA, 19 nt, Artificial Sequence
  Description of Artificial Sequence: Synthetic oligonucleotide
  Antisense strand to SEQ ID NO: 2584756
uccauacuaaacaucuccc

SEQ ID NO: 2584758 - RNA, 19 nt, Artificial Sequence
  Description of Artificial Sequence: Synthetic oligonucleotide
  Sense strand starting at position 3266 of SEQ ID NO: 1889199
agauguuuaguauggaaga

SEQ ID NO: 2584759 - RNA, 19 nt, Artificial Sequence
  Description of Artificial Sequence: Synthetic oligonucleotide
  Antisense strand to SEQ ID NO: 2584758
ucuuccauacuaaacaucu

SEQ ID NO: 2584760 - RNA, 19 nt, Artificial Sequence
  Description of Artificial Sequence: Synthetic oligonucleotide
  Sense strand starting at position 3435 of SEQ ID NO: 1889199
caguuuguacucuacaugu

SEQ ID NO: 2584761 - RNA, 19 nt, Artificial Sequence
  Description of Artificial Sequence: Synthetic oligonucleotide
  Antisense strand to SEQ ID NO: 2584760
acauguagaguacaaacug

SEQ ID NO: 2584762 - RNA, 19 nt, Artificial Sequence
  Description of Artificial Sequence: Synthetic oligonucleotide
  Sense strand starting at position 3497 of SEQ ID NO: 1889199
ugugcauggcuugugcaau

SEQ ID NO: 2584763 - RNA, 19 nt, Artificial Sequence
  Description of Artificial Sequence: Synthetic oligonucleotide
  Antisense strand to SEQ ID NO: 2584762
auugcacaagccaugcaca

SEQ ID NO: 2584764 - RNA, 19 nt, Artificial Sequence
  Description of Artificial Sequence: Synthetic oligonucleotide
  Sense strand starting at position 3512 of SEQ ID NO: 1889199
caauuaagaggauguggua

SEQ ID NO: 2584765 - RNA, 19 nt, Artificial Sequence
  Description of Artificial Sequence: Synthetic oligonucleotide
  Antisense strand to SEQ ID NO: 2584764
uaccacauccucuuaauug

SEQ ID NO: 2584766 - RNA, 19 nt, Artificial Sequence
  Description of Artificial Sequence: Synthetic oligonucleotide
  Sense strand starting at position 3540 of SEQ ID NO: 1889199
caaggaacuucugugucau

SEQ ID NO: 2584767 - RNA, 19 nt, Artificial Sequence
  Description of Artificial Sequence: Synthetic oligonucleotide
  Antisense strand to SEQ ID NO: 2584766
augacacagaaguuccuug

SEQ ID NO: 2584768 - RNA, 19 nt, Artificial Sequence
  Description of Artificial Sequence: Synthetic oligonucleotide
  Sense strand starting at position 3541 of SEQ ID NO: 1889199
aaggaacuucugugucauc

SEQ ID NO: 2584769 - RNA, 19 nt, Artificial Sequence
  Description of Artificial Sequence: Synthetic oligonucleotide
  Antisense strand to SEQ ID NO: 2584768
gaugacacagaaguuccuu

SEQ ID NO: 2584770 - RNA, 19 nt, Artificial Sequence
  Description of Artificial Sequence: Synthetic oligonucleotide
  Sense strand starting at position 3618 of SEQ ID NO: 1889199
uguccucuucucuaucuga

SEQ ID NO: 2584771 - RNA, 19 nt, Artificial Sequence
  Description of Artificial Sequence: Synthetic oligonucleotide
  Antisense strand to SEQ ID NO: 2584770
ucagauagagaagaggaca

SEQ ID NO: 2584772 - RNA, 19 nt, Artificial Sequence
  Description of Artificial Sequence: Synthetic oligonucleotide
  Sense strand starting at position 3692 of SEQ ID NO: 1889199
gugcucccucaugacauaa

SEQ ID NO: 2584773 - RNA, 19 nt, Artificial Sequence
  Description of Artificial Sequence: Synthetic oligonucleotide
  Antisense strand to SEQ ID NO: 2584772
uuaugucaugagggagcac

SEQ ID NO: 2584774 - RNA, 19 nt, Artificial Sequence
  Description of Artificial Sequence: Synthetic oligonucleotide
  Sense strand starting at position 3723 of SEQ ID NO: 1889199
gcuggucucauguauugau

SEQ ID NO: 2584775 - RNA, 19 nt, Artificial Sequence
  Description of Artificial Sequence: Synthetic oligonucleotide
  Antisense strand to SEQ ID NO: 2584774
aucaauacaugagaccagc

SEQ ID NO: 2584776 - RNA, 19 nt, Artificial Sequence
  Description of Artificial Sequence: Synthetic oligonucleotide
  Sense strand starting at position 3871 of SEQ ID NO: 1889199
aagguaacaccgcaguauu

SEQ ID NO: 2584777 - RNA, 19 nt, Artificial Sequence
  Description of Artificial Sequence: Synthetic oligonucleotide
  Antisense strand to SEQ ID NO: 2584776
aauacugcgguguuaccuu

SEQ ID NO: 2584778 - RNA, 19 nt, Artificial Sequence
  Description of Artificial Sequence: Synthetic oligonucleotide
  Sense strand starting at position 3881 of SEQ ID NO: 1889199
cgcaguauugcagaauaca

SEQ ID NO: 2584779 - RNA, 19 nt, Artificial Sequence
  Description of Artificial Sequence: Synthetic oligonucleotide
  Antisense strand to SEQ ID NO: 2584778
uguauucugcaauacugcg

SEQ ID NO: 2584780 - RNA, 19 nt, Artificial Sequence
  Description of Artificial Sequence: Synthetic oligonucleotide
  Sense strand starting at position 441 of SEQ ID NO: 1889200
aauguuggacucugaaugu

SEQ ID NO: 2584781 - RNA, 19 nt, Artificial Sequence
  Description of Artificial Sequence: Synthetic oligonucleotide
  Antisense strand to SEQ ID NO: 2584780
acauucagaguccaacauu

SEQ ID NO: 2584782 - RNA, 19 nt, Artificial Sequence
  Description of Artificial Sequence: Synthetic oligonucleotide
  Sense strand starting at position 445 of SEQ ID NO: 1889200
uuggacucugaauguuauu

SEQ ID NO: 2584783 - RNA, 19 nt, Artificial Sequence
  Description of Artificial Sequence: Synthetic oligonucleotide
  Antisense strand to SEQ ID NO: 2584782
aauaacauucagaguccaa

SEQ ID NO: 2584784 - RNA, 19 nt, Artificial Sequence
  Description of Artificial Sequence: Synthetic oligonucleotide
  Sense strand starting at position 457 of SEQ ID NO: 1889200
uguuauuccgaggaguuuc

SEQ ID NO: 2584785 - RNA, 19 nt, Artificial Sequence
  Description of Artificial Sequence: Synthetic oligonucleotide
  Antisense strand to SEQ ID NO: 2584784
gaaacuccucggaauaaca

SEQ ID NO: 2584786 - RNA, 19 nt, Artificial Sequence
  Description of Artificial Sequence: Synthetic oligonucleotide
  Sense strand starting at position 514 of SEQ ID NO: 1889200
gcauauuaccagcaugaac

SEQ ID NO: 2584787 - RNA, 19 nt, Artificial Sequence
  Description of Artificial Sequence: Synthetic oligonucleotide
  Antisense strand to SEQ ID NO: 2584786
guucaugcugguaauaugc

SEQ ID NO: 2584788 - RNA, 19 nt, Artificial Sequence
  Description of Artificial Sequence: Synthetic oligonucleotide
  Sense strand starting at position 554 of SEQ ID NO: 1889200
aaacuugagugauuagagu

SEQ ID NO: 2584789 - RNA, 19 nt, Artificial Sequence
  Description of Artificial Sequence: Synthetic oligonucleotide
  Antisense strand to SEQ ID NO: 2584788
acucuaaucacucaaguuu

SEQ ID NO: 2584790 - RNA, 19 nt, Artificial Sequence
  Description of Artificial Sequence: Synthetic oligonucleotide
  Sense strand starting at position 942 of SEQ ID NO: 1889200
uggaaacaugacugguguu

SEQ ID NO: 2584791 - RNA, 19 nt, Artificial Sequence
  Description of Artificial Sequence: Synthetic oligonucleotide
  Antisense strand to SEQ ID NO: 2584790
aacaccagucauguuucca

SEQ ID NO: 2584792 - RNA, 19 nt, Artificial Sequence
  Description of Artificial Sequence: Synthetic oligonucleotide
  Sense strand starting at position 971 of SEQ ID NO: 1889200
gcagacuagagagguugau

SEQ ID NO: 2584793 - RNA, 19 nt, Artificial Sequence
  Description of Artificial Sequence: Synthetic oligonucleotide
  Antisense strand to SEQ ID NO: 2584792
aucaaccucucuagucugc

SEQ ID NO: 2584794 - RNA, 19 nt, Artificial Sequence
  Description of Artificial Sequence: Synthetic oligonucleotide
  Sense strand starting at position 1003 of SEQ ID NO: 1889200
gggauuuauuuaugugcac

SEQ ID NO: 2584795 - RNA, 19 nt, Artificial Sequence
  Description of Artificial Sequence: Synthetic oligonucleotide
  Antisense strand to SEQ ID NO: 2584794
gugcacauaaauaaauccc

SEQ ID NO: 2584796 - RNA, 19 nt, Artificial Sequence
  Description of Artificial Sequence: Synthetic oligonucleotide
  Sense strand starting at position 1107 of SEQ ID NO: 1889200
aguaaagcaguugauuaua

SEQ ID NO: 2584797 - RNA, 19 nt, Artificial Sequence
  Description of Artificial Sequence: Synthetic oligonucleotide
  Antisense strand to SEQ ID NO: 2584796
uauaaucaacugcuuuacu

SEQ ID NO: 2584798 - RNA, 19 nt, Artificial Sequence
  Description of Artificial Sequence: Synthetic oligonucleotide
  Sense strand starting at position 1198 of SEQ ID NO: 1889200
ugcagcuguguugaaagaa

SEQ ID NO: 2584799 - RNA, 19 nt, Artificial Sequence
  Description of Artificial Sequence: Synthetic oligonucleotide
  Antisense strand to SEQ ID NO: 2584798
uucuuucaacacagcugca

SEQ ID NO: 2584800 - RNA, 19 nt, Artificial Sequence
  Description of Artificial Sequence: Synthetic oligonucleotide
  Sense strand starting at position 1317 of SEQ ID NO: 1889200
ucaacuuugcuccaguaag

SEQ ID NO: 2584801 - RNA, 19 nt, Artificial Sequence
  Description of Artificial Sequence: Synthetic oligonucleotide
  Antisense strand to SEQ ID NO: 2584800
cuuacuggagcaaaguuga

SEQ ID NO: 2584802 - RNA, 19 nt, Artificial Sequence
  Description of Artificial Sequence: Synthetic oligonucleotide
  Sense strand starting at position 1388 of SEQ ID NO: 1889200
augacuguccuugaaguga

SEQ ID NO: 2584803 - RNA, 19 nt, Artificial Sequence
  Description of Artificial Sequence: Synthetic oligonucleotide
  Antisense strand to SEQ ID NO: 2584802
ucacuucaaggacagucau

SEQ ID NO: 2584804 - RNA, 19 nt, Artificial Sequence
  Description of Artificial Sequence: Synthetic oligonucleotide
  Sense strand starting at position 1483 of SEQ ID NO: 1889200
ugauaccauuuauaggaga

SEQ ID NO: 2584805 - RNA, 19 nt, Artificial Sequence
  Description of Artificial Sequence: Synthetic oligonucleotide
  Antisense strand to SEQ ID NO: 2584804
ucuccuauaaaugguauca

SEQ ID NO: 2584806 - RNA, 19 nt, Artificial Sequence
  Description of Artificial Sequence: Synthetic oligonucleotide
  Sense strand starting at position 1553 of SEQ ID NO: 1889200
uucuucuuuggucaaaggu

SEQ ID NO: 2584807 - RNA, 19 nt, Artificial Sequence
  Description of Artificial Sequence: Synthetic oligonucleotide
  Antisense strand to SEQ ID NO: 2584806
accuuugaccaaagaagaa

SEQ ID NO: 2584808 - RNA, 19 nt, Artificial Sequence
  Description of Artificial Sequence: Synthetic oligonucleotide
  Sense strand starting at position 1560 of SEQ ID NO: 1889200
uuggucaaagguugauauu

SEQ ID NO: 2584809 - RNA, 19 nt, Artificial Sequence
  Description of Artificial Sequence: Synthetic oligonucleotide
  Antisense strand to SEQ ID NO: 2584808
aauaucaaccuuugaccaa

SEQ ID NO: 2584810 - RNA, 19 nt, Artificial Sequence
  Description of Artificial Sequence: Synthetic oligonucleotide
  Sense strand starting at position 1563 of SEQ ID NO: 1889200
gucaaagguugauauuuag

SEQ ID NO: 2584811 - RNA, 19 nt, Artificial Sequence
  Description of Artificial Sequence: Synthetic oligonucleotide
  Antisense strand to SEQ ID NO: 2584810
cuaaauaucaaccuuugac

SEQ ID NO: 2584812 - RNA, 19 nt, Artificial Sequence
  Description of Artificial Sequence: Synthetic oligonucleotide
  Sense strand starting at position 1577 of SEQ ID NO: 1889200
uuuaguuagggcuauuaac

SEQ ID NO: 2584813 - RNA, 19 nt, Artificial Sequence
  Description of Artificial Sequence: Synthetic oligonucleotide
  Antisense strand to SEQ ID NO: 2584812
guuaauagcccuaacuaaa

SEQ ID NO: 2584814 - RNA, 19 nt, Artificial Sequence
  Description of Artificial Sequence: Synthetic oligonucleotide
  Sense strand starting at position 1588 of SEQ ID NO: 1889200
cuauuaacucaguagcagu

SEQ ID NO: 2584815 - RNA, 19 nt, Artificial Sequence
  Description of Artificial Sequence: Synthetic oligonucleotide
  Antisense strand to SEQ ID NO: 2584814
acugcuacugaguuaauag

SEQ ID NO: 2584816 - RNA, 19 nt, Artificial Sequence
  Description of Artificial Sequence: Synthetic oligonucleotide
  Sense strand starting at position 1640 of SEQ ID NO: 1889200
auguguagaaguugggaau

SEQ ID NO: 2584817 - RNA, 19 nt, Artificial Sequence
  Description of Artificial Sequence: Synthetic oligonucleotide
  Antisense strand to SEQ ID NO: 2584816
auucccaacuucuacacau

SEQ ID NO: 2584818 - RNA, 19 nt, Artificial Sequence
  Description of Artificial Sequence: Synthetic oligonucleotide
  Sense strand starting at position 1710 of SEQ ID NO: 1889200
caaagcaaugaguagcaua

SEQ ID NO: 2584819 - RNA, 19 nt, Artificial Sequence
  Description of Artificial Sequence: Synthetic oligonucleotide
  Antisense strand to SEQ ID NO: 2584818
uaugcuacucauugcuuug

SEQ ID NO: 2584820 - RNA, 19 nt, Artificial Sequence
  Description of Artificial Sequence: Synthetic oligonucleotide
  Sense strand starting at position 1718 of SEQ ID NO: 1889200
ugaguagcauauuuauguu

SEQ ID NO: 2584821 - RNA, 19 nt, Artificial Sequence
  Description of Artificial Sequence: Synthetic oligonucleotide
  Antisense strand to SEQ ID NO: 2584820
aacauaaauaugcuacuca

SEQ ID NO: 2584822 - RNA, 19 nt, Artificial Sequence
  Description of Artificial Sequence: Synthetic oligonucleotide
  Sense strand starting at position 1724 of SEQ ID NO: 1889200
gcauauuuauguuuagugu

SEQ ID NO: 2584823 - RNA, 19 nt, Artificial Sequence
  Description of Artificial Sequence: Synthetic oligonucleotide
  Antisense strand to SEQ ID NO: 2584822
acacuaaacauaaauaugc

SEQ ID NO: 2584824 - RNA, 19 nt, Artificial Sequence
  Description of Artificial Sequence: Synthetic oligonucleotide
  Sense strand starting at position 1767 of SEQ ID NO: 1889200
ggaggagguugaguauagu

SEQ ID NO: 2584825 - RNA, 19 nt, Artificial Sequence
  Description of Artificial Sequence: Synthetic oligonucleotide
  Antisense strand to SEQ ID NO: 2584824
acuauacucaaccuccucc

SEQ ID NO: 2584826 - RNA, 19 nt, Artificial Sequence
  Description of Artificial Sequence: Synthetic oligonucleotide
  Sense strand starting at position 1849 of SEQ ID NO: 1889200
uuuaacuugccugaugagu

SEQ ID NO: 2584827 - RNA, 19 nt, Artificial Sequence
  Description of Artificial Sequence: Synthetic oligonucleotide
  Antisense strand to SEQ ID NO: 2584826
acucaucaggcaaguuaaa

SEQ ID NO: 2584828 - RNA, 19 nt, Artificial Sequence
  Description of Artificial Sequence: Synthetic oligonucleotide
  Sense strand starting at position 1995 of SEQ ID NO: 1889200
guuguucucagugacaacu

SEQ ID NO: 2584829 - RNA, 19 nt, Artificial Sequence
  Description of Artificial Sequence: Synthetic oligonucleotide
  Antisense strand to SEQ ID NO: 2584828
aguugucacugagaacaac

SEQ ID NO: 2584830 - RNA, 19 nt, Artificial Sequence
  Description of Artificial Sequence: Synthetic oligonucleotide
  Sense strand starting at position 2024 of SEQ ID NO: 1889200
gcaugauuagcugccuguu

SEQ ID NO: 2584831 - RNA, 19 nt, Artificial Sequence
  Description of Artificial Sequence: Synthetic oligonucleotide
  Antisense strand to SEQ ID NO: 2584830
aacaggcagcuaaucaugc

SEQ ID NO: 2584832 - RNA, 19 nt, Artificial Sequence
  Description of Artificial Sequence: Synthetic oligonucleotide
  Sense strand starting at position 2062 of SEQ ID NO: 1889200
cgauuaaggcaugauuccu

SEQ ID NO: 2584833 - RNA, 19 nt, Artificial Sequence
  Description of Artificial Sequence: Synthetic oligonucleotide
  Antisense strand to SEQ ID NO: 2584832
aggaaucaugccuuaaucg

SEQ ID NO: 2584834 - RNA, 19 nt, Artificial Sequence
  Description of Artificial Sequence: Synthetic oligonucleotide
  Sense strand starting at position 2171 of SEQ ID NO: 1889200
caaagagaguaguuagguu

SEQ ID NO: 2584835 - RNA, 19 nt, Artificial Sequence
  Description of Artificial Sequence: Synthetic oligonucleotide
  Antisense strand to SEQ ID NO: 2584834
aaccuaacuacucucuuug

SEQ ID NO: 2584836 - RNA, 19 nt, Artificial Sequence
  Description of Artificial Sequence: Synthetic oligonucleotide
  Sense strand starting at position 2175 of SEQ ID NO: 1889200
gagaguaguuagguuuaaa

SEQ ID NO: 2584837 - RNA, 19 nt, Artificial Sequence
  Description of Artificial Sequence: Synthetic oligonucleotide
  Antisense strand to SEQ ID NO: 2584836
uuuaaaccuaacuacucuc

SEQ ID NO: 2584838 - RNA, 19 nt, Artificial Sequence
  Description of Artificial Sequence: Synthetic oligonucleotide
  Sense strand starting at position 2235 of SEQ ID NO: 1889200
guaccugacgcugaauacu

SEQ ID NO: 2584839 - RNA, 19 nt, Artificial Sequence
  Description of Artificial Sequence: Synthetic oligonucleotide
  Antisense strand to SEQ ID NO: 2584838
aguauucagcgucagguac

SEQ ID NO: 2584840 - RNA, 19 nt, Artificial Sequence
  Description of Artificial Sequence: Synthetic oligonucleotide
  Sense strand starting at position 2340 of SEQ ID NO: 1889200
uuugguguggcugauugaa

SEQ ID NO: 2584841 - RNA, 19 nt, Artificial Sequence
  Description of Artificial Sequence: Synthetic oligonucleotide
  Antisense strand to SEQ ID NO: 2584840
uucaaucagccacaccaaa

SEQ ID NO: 2584842 - RNA, 19 nt, Artificial Sequence
  Description of Artificial Sequence: Synthetic oligonucleotide
  Sense strand starting at position 2966 of SEQ ID NO: 1889200
uuaucaguucccuaauagu

SEQ ID NO: 2584843 - RNA, 19 nt, Artificial Sequence
  Description of Artificial Sequence: Synthetic oligonucleotide
  Antisense strand to SEQ ID NO: 2584842
acuauuagggaacugauaa

SEQ ID NO: 2584844 - RNA, 19 nt, Artificial Sequence
  Description of Artificial Sequence: Synthetic oligonucleotide
  Sense strand starting at position 3084 of SEQ ID NO: 1889200
uugauuguaacauaugugu

SEQ ID NO: 2584845 - RNA, 19 nt, Artificial Sequence
  Description of Artificial Sequence: Synthetic oligonucleotide
  Antisense strand to SEQ ID NO: 2584844
acacauauguuacaaucaa

SEQ ID NO: 2584846 - RNA, 19 nt, Artificial Sequence
  Description of Artificial Sequence: Synthetic oligonucleotide
  Sense strand starting at position 3249 of SEQ ID NO: 1889200
gacuauaaaugugcaggua

SEQ ID NO: 2584847 - RNA, 19 nt, Artificial Sequence
  Description of Artificial Sequence: Synthetic oligonucleotide
  Antisense strand to SEQ ID NO: 2584846
uaccugcacauuuauaguc

SEQ ID NO: 2584848 - RNA, 19 nt, Artificial Sequence
  Description of Artificial Sequence: Synthetic oligonucleotide
  Sense strand starting at position 3250 of SEQ ID NO: 1889200
acuauaaaugugcagguau

SEQ ID NO: 2584849 - RNA, 19 nt, Artificial Sequence
  Description of Artificial Sequence: Synthetic oligonucleotide
  Antisense strand to SEQ ID NO: 2584848
auaccugcacauuuauagu

SEQ ID NO: 2584850 - RNA, 19 nt, Artificial Sequence
  Description of Artificial Sequence: Synthetic oligonucleotide
  Sense strand starting at position 3252 of SEQ ID NO: 1889200
uauaaaugugcagguauga

SEQ ID NO: 2584851 - RNA, 19 nt, Artificial Sequence
  Description of Artificial Sequence: Synthetic oligonucleotide
  Antisense strand to SEQ ID NO: 2584850
ucauaccugcacauuuaua

SEQ ID NO: 2584852 - RNA, 19 nt, Artificial Sequence
  Description of Artificial Sequence: Synthetic oligonucleotide
  Sense strand starting at position 3629 of SEQ ID NO: 1889200
cuuuauuggccucagaaga

SEQ ID NO: 2584853 - RNA, 19 nt, Artificial Sequence
  Description of Artificial Sequence: Synthetic oligonucleotide
  Antisense strand to SEQ ID NO: 2584852
ucuucugaggccaauaaag

SEQ ID NO: 2584854 - RNA, 19 nt, Artificial Sequence
  Description of Artificial Sequence: Synthetic oligonucleotide
  Sense strand starting at position 3637 of SEQ ID NO: 1889200
gccucagaagaaugugauc

SEQ ID NO: 2584855 - RNA, 19 nt, Artificial Sequence
  Description of Artificial Sequence: Synthetic oligonucleotide
  Antisense strand to SEQ ID NO: 2584854
gaucacauucuucugaggc

SEQ ID NO: 2584856 - RNA, 19 nt, Artificial Sequence
  Description of Artificial Sequence: Synthetic oligonucleotide
  Sense strand starting at position 3642 of SEQ ID NO: 1889200
agaagaaugugaucuuugu

SEQ ID NO: 2584857 - RNA, 19 nt, Artificial Sequence
  Description of Artificial Sequence: Synthetic oligonucleotide
  Antisense strand to SEQ ID NO: 2584856
acaaagaucacauucuucu

SEQ ID NO: 2584858 - RNA, 19 nt, Artificial Sequence
  Description of Artificial Sequence: Synthetic oligonucleotide
  Sense strand starting at position 3778 of SEQ ID NO: 1889200
ggguccuaccuguauguga

SEQ ID NO: 2584859 - RNA, 19 nt, Artificial Sequence
  Description of Artificial Sequence: Synthetic oligonucleotide
  Antisense strand to SEQ ID NO: 2584858
ucacauacagguaggaccc

SEQ ID NO: 2584860 - RNA, 19 nt, Artificial Sequence
  Description of Artificial Sequence: Synthetic oligonucleotide
  Sense strand starting at position 183 of SEQ ID NO: 1889201
aagacuagauuggaagaau

SEQ ID NO: 2584861 - RNA, 19 nt, Artificial Sequence
  Description of Artificial Sequence: Synthetic oligonucleotide
  Antisense strand to SEQ ID NO: 2584860
auucuuccaaucuagucuu

SEQ ID NO: 2584862 - RNA, 19 nt, Artificial Sequence
  Description of Artificial Sequence: Synthetic oligonucleotide
  Sense strand starting at position 382 of SEQ ID NO: 1889201
aguuacucccuguaacuau

SEQ ID NO: 2584863 - RNA, 19 nt, Artificial Sequence
  Description of Artificial Sequence: Synthetic oligonucleotide
  Antisense strand to SEQ ID NO: 2584862
auaguuacagggaguaacu

SEQ ID NO: 2584864 - RNA, 19 nt, Artificial Sequence
  Description of Artificial Sequence: Synthetic oligonucleotide
  Sense strand starting at position 407 of SEQ ID NO: 1889201
cugugaaguaggcaauaca

SEQ ID NO: 2584865 - RNA, 19 nt, Artificial Sequence
  Description of Artificial Sequence: Synthetic oligonucleotide
  Antisense strand to SEQ ID NO: 2584864
uguauugccuacuucacag

SEQ ID NO: 2584866 - RNA, 19 nt, Artificial Sequence
  Description of Artificial Sequence: Synthetic oligonucleotide
  Sense strand starting at position 418 of SEQ ID NO: 1889201
gcaauacaguuguuaaaga

SEQ ID NO: 2584867 - RNA, 19 nt, Artificial Sequence
  Description of Artificial Sequence: Synthetic oligonucleotide
  Antisense strand to SEQ ID NO: 2584866
ucuuuaacaacuguauugc

SEQ ID NO: 2584868 - RNA, 19 nt, Artificial Sequence
  Description of Artificial Sequence: Synthetic oligonucleotide
  Sense strand starting at position 442 of SEQ ID NO: 1889201
aauguuggacucugaaugu

SEQ ID NO: 2584869 - RNA, 19 nt, Artificial Sequence
  Description of Artificial Sequence: Synthetic oligonucleotide
  Antisense strand to SEQ ID NO: 2584868
acauucagaguccaacauu

SEQ ID NO: 2584870 - RNA, 19 nt, Artificial Sequence
  Description of Artificial Sequence: Synthetic oligonucleotide
  Sense strand starting at position 446 of SEQ ID NO: 1889201
uuggacucugaauguuauu

SEQ ID NO: 2584871 - RNA, 19 nt, Artificial Sequence
  Description of Artificial Sequence: Synthetic oligonucleotide
  Antisense strand to SEQ ID NO: 2584870
aauaacauucagaguccaa

SEQ ID NO: 2584872 - RNA, 19 nt, Artificial Sequence
  Description of Artificial Sequence: Synthetic oligonucleotide
  Sense strand starting at position 515 of SEQ ID NO: 1889201
gcauauuaccagcaugaac

SEQ ID NO: 2584873 - RNA, 19 nt, Artificial Sequence
  Description of Artificial Sequence: Synthetic oligonucleotide
  Antisense strand to SEQ ID NO: 2584872
guucaugcugguaauaugc

SEQ ID NO: 2584874 - RNA, 19 nt, Artificial Sequence
  Description of Artificial Sequence: Synthetic oligonucleotide
  Sense strand starting at position 555 of SEQ ID NO: 1889201
aaacuugagugauuagagu

SEQ ID NO: 2584875 - RNA, 19 nt, Artificial Sequence
  Description of Artificial Sequence: Synthetic oligonucleotide
  Antisense strand to SEQ ID NO: 2584874
acucuaaucacucaaguuu

SEQ ID NO: 2584876 - RNA, 19 nt, Artificial Sequence
  Description of Artificial Sequence: Synthetic oligonucleotide
  Sense strand starting at position 943 of SEQ ID NO: 1889201
uggaaacaugacugguguu

SEQ ID NO: 2584877 - RNA, 19 nt, Artificial Sequence
  Description of Artificial Sequence: Synthetic oligonucleotide
  Antisense strand to SEQ ID NO: 2584876
aacaccagucauguuucca

SEQ ID NO: 2584878 - RNA, 19 nt, Artificial Sequence
  Description of Artificial Sequence: Synthetic oligonucleotide
  Sense strand starting at position 972 of SEQ ID NO: 1889201
gcagacuagagagguugau

SEQ ID NO: 2584879 - RNA, 19 nt, Artificial Sequence
  Description of Artificial Sequence: Synthetic oligonucleotide
  Antisense strand to SEQ ID NO: 2584878
aucaaccucucuagucugc

SEQ ID NO: 2584880 - RNA, 19 nt, Artificial Sequence
  Description of Artificial Sequence: Synthetic oligonucleotide
  Sense strand starting at position 1004 of SEQ ID NO: 1889201
gggauuuauuuaugugcac

SEQ ID NO: 2584881 - RNA, 19 nt, Artificial Sequence
  Description of Artificial Sequence: Synthetic oligonucleotide
  Antisense strand to SEQ ID NO: 2584880
gugcacauaaauaaauccc

SEQ ID NO: 2584882 - RNA, 19 nt, Artificial Sequence
  Description of Artificial Sequence: Synthetic oligonucleotide
  Sense strand starting at position 1108 of SEQ ID NO: 1889201
aguaaagcaguugauuaua

SEQ ID NO: 2584883 - RNA, 19 nt, Artificial Sequence
  Description of Artificial Sequence: Synthetic oligonucleotide
  Antisense strand to SEQ ID NO: 2584882
uauaaucaacugcuuuacu

SEQ ID NO: 2584884 - RNA, 19 nt, Artificial Sequence
  Description of Artificial Sequence: Synthetic oligonucleotide
  Sense strand starting at position 1199 of SEQ ID NO: 1889201
ugcagcuguguugaaagaa

SEQ ID NO: 2584885 - RNA, 19 nt, Artificial Sequence
  Description of Artificial Sequence: Synthetic oligonucleotide
  Antisense strand to SEQ ID NO: 2584884
uucuuucaacacagcugca

SEQ ID NO: 2584886 - RNA, 19 nt, Artificial Sequence
  Description of Artificial Sequence: Synthetic oligonucleotide
  Sense strand starting at position 1318 of SEQ ID NO: 1889201
ucaacuuugcuccaguaag

SEQ ID NO: 2584887 - RNA, 19 nt, Artificial Sequence
  Description of Artificial Sequence: Synthetic oligonucleotide
  Antisense strand to SEQ ID NO: 2584886
cuuacuggagcaaaguuga

SEQ ID NO: 2584888 - RNA, 19 nt, Artificial Sequence
  Description of Artificial Sequence: Synthetic oligonucleotide
  Sense strand starting at position 1389 of SEQ ID NO: 1889201
augacuguccuugaaguga

SEQ ID NO: 2584889 - RNA, 19 nt, Artificial Sequence
  Description of Artificial Sequence: Synthetic oligonucleotide
  Antisense strand to SEQ ID NO: 2584888
ucacuucaaggacagucau

SEQ ID NO: 2584890 - RNA, 19 nt, Artificial Sequence
  Description of Artificial Sequence: Synthetic oligonucleotide
  Sense strand starting at position 1484 of SEQ ID NO: 1889201
ugauaccauuuauaggaga

SEQ ID NO: 2584891 - RNA, 19 nt, Artificial Sequence
  Description of Artificial Sequence: Synthetic oligonucleotide
  Antisense strand to SEQ ID NO: 2584890
ucuccuauaaaugguauca

SEQ ID NO: 2584892 - RNA, 19 nt, Artificial Sequence
  Description of Artificial Sequence: Synthetic oligonucleotide
  Sense strand starting at position 1554 of SEQ ID NO: 1889201
uucuucuuuggucaaaggu

SEQ ID NO: 2584893 - RNA, 19 nt, Artificial Sequence
  Description of Artificial Sequence: Synthetic oligonucleotide
  Antisense strand to SEQ ID NO: 2584892
accuuugaccaaagaagaa

SEQ ID NO: 2584894 - RNA, 19 nt, Artificial Sequence
  Description of Artificial Sequence: Synthetic oligonucleotide
  Sense strand starting at position 1561 of SEQ ID NO: 1889201
uuggucaaagguugauauu

SEQ ID NO: 2584895 - RNA, 19 nt, Artificial Sequence
  Description of Artificial Sequence: Synthetic oligonucleotide
  Antisense strand to SEQ ID NO: 2584894
aauaucaaccuuugaccaa

SEQ ID NO: 2584896 - RNA, 19 nt, Artificial Sequence
  Description of Artificial Sequence: Synthetic oligonucleotide
  Sense strand starting at position 1564 of SEQ ID NO: 1889201
gucaaagguugauauuuag

SEQ ID NO: 2584897 - RNA, 19 nt, Artificial Sequence
  Description of Artificial Sequence: Synthetic oligonucleotide
  Antisense strand to SEQ ID NO: 2584896
cuaaauaucaaccuuugac

SEQ ID NO: 2584898 - RNA, 19 nt, Artificial Sequence
  Description of Artificial Sequence: Synthetic oligonucleotide
  Sense strand starting at position 1578 of SEQ ID NO: 1889201
uuuaguuagggcuauuaac

SEQ ID NO: 2584899 - RNA, 19 nt, Artificial Sequence
  Description of Artificial Sequence: Synthetic oligonucleotide
  Antisense strand to SEQ ID NO: 2584898
guuaauagcccuaacuaaa

SEQ ID NO: 2584900 - RNA, 19 nt, Artificial Sequence
  Description of Artificial Sequence: Synthetic oligonucleotide
  Sense strand starting at position 1589 of SEQ ID NO: 1889201
cuauuaacucaguagcagu

SEQ ID NO: 2584901 - RNA, 19 nt, Artificial Sequence
  Description of Artificial Sequence: Synthetic oligonucleotide
  Antisense strand to SEQ ID NO: 2584900
acugcuacugaguuaauag

SEQ ID NO: 2584902 - RNA, 19 nt, Artificial Sequence
  Description of Artificial Sequence: Synthetic oligonucleotide
  Sense strand starting at position 1641 of SEQ ID NO: 1889201
auguguagaaguugggaau

SEQ ID NO: 2584903 - RNA, 19 nt, Artificial Sequence
  Description of Artificial Sequence: Synthetic oligonucleotide
  Antisense strand to SEQ ID NO: 2584902
auucccaacuucuacacau

SEQ ID NO: 2584904 - RNA, 19 nt, Artificial Sequence
  Description of Artificial Sequence: Synthetic oligonucleotide
  Sense strand starting at position 1711 of SEQ ID NO: 1889201
caaagcaaugaguagcaua

SEQ ID NO: 2584905 - RNA, 19 nt, Artificial Sequence
  Description of Artificial Sequence: Synthetic oligonucleotide
  Antisense strand to SEQ ID NO: 2584904
uaugcuacucauugcuuug

SEQ ID NO: 2584906 - RNA, 19 nt, Artificial Sequence
  Description of Artificial Sequence: Synthetic oligonucleotide
  Sense strand starting at position 1719 of SEQ ID NO: 1889201
ugaguagcauauuuauguu

SEQ ID NO: 2584907 - RNA, 19 nt, Artificial Sequence
  Description of Artificial Sequence: Synthetic oligonucleotide
  Antisense strand to SEQ ID NO: 2584906
aacauaaauaugcuacuca

SEQ ID NO: 2584908 - RNA, 19 nt, Artificial Sequence
  Description of Artificial Sequence: Synthetic oligonucleotide
  Sense strand starting at position 1725 of SEQ ID NO: 1889201
gcauauuuauguuuagugu

SEQ ID NO: 2584909 - RNA, 19 nt, Artificial Sequence
  Description of Artificial Sequence: Synthetic oligonucleotide
  Antisense strand to SEQ ID NO: 2584908
acacuaaacauaaauaugc

SEQ ID NO: 2584910 - RNA, 19 nt, Artificial Sequence
  Description of Artificial Sequence: Synthetic oligonucleotide
  Sense strand starting at position 1768 of SEQ ID NO: 1889201
ggaggagguugaguauagu

SEQ ID NO: 2584911 - RNA, 19 nt, Artificial Sequence
  Description of Artificial Sequence: Synthetic oligonucleotide
  Antisense strand to SEQ ID NO: 2584910
acuauacucaaccuccucc

SEQ ID NO: 2584912 - RNA, 19 nt, Artificial Sequence
  Description of Artificial Sequence: Synthetic oligonucleotide
  Sense strand starting at position 1850 of SEQ ID NO: 1889201
uuuaacuugccugaugagu

SEQ ID NO: 2584913 - RNA, 19 nt, Artificial Sequence
  Description of Artificial Sequence: Synthetic oligonucleotide
  Antisense strand to SEQ ID NO: 2584912
acucaucaggcaaguuaaa

SEQ ID NO: 2584914 - RNA, 19 nt, Artificial Sequence
  Description of Artificial Sequence: Synthetic oligonucleotide
  Sense strand starting at position 1996 of SEQ ID NO: 1889201
guuguucucagugacaacu

SEQ ID NO: 2584915 - RNA, 19 nt, Artificial Sequence
  Description of Artificial Sequence: Synthetic oligonucleotide
  Antisense strand to SEQ ID NO: 2584914
aguugucacugagaacaac

SEQ ID NO: 2584916 - RNA, 19 nt, Artificial Sequence
  Description of Artificial Sequence: Synthetic oligonucleotide
  Sense strand starting at position 2025 of SEQ ID NO: 1889201
gcaugauuagcugccuguu

SEQ ID NO: 2584917 - RNA, 19 nt, Artificial Sequence
  Description of Artificial Sequence: Synthetic oligonucleotide
  Antisense strand to SEQ ID NO: 2584916
aacaggcagcuaaucaugc

SEQ ID NO: 2584918 - RNA, 19 nt, Artificial Sequence
  Description of Artificial Sequence: Synthetic oligonucleotide
  Sense strand starting at position 2063 of SEQ ID NO: 1889201
cgauuaaggcaugauuccu

SEQ ID NO: 2584919 - RNA, 19 nt, Artificial Sequence
  Description of Artificial Sequence: Synthetic oligonucleotide
  Antisense strand to SEQ ID NO: 2584918
aggaaucaugccuuaaucg

SEQ ID NO: 2584920 - RNA, 19 nt, Artificial Sequence
  Description of Artificial Sequence: Synthetic oligonucleotide
  Sense strand starting at position 2172 of SEQ ID NO: 1889201
caaagagaguaguuagguu

SEQ ID NO: 2584921 - RNA, 19 nt, Artificial Sequence
  Description of Artificial Sequence: Synthetic oligonucleotide
  Antisense strand to SEQ ID NO: 2584920
aaccuaacuacucucuuug

SEQ ID NO: 2584922 - RNA, 19 nt, Artificial Sequence
  Description of Artificial Sequence: Synthetic oligonucleotide
  Sense strand starting at position 2176 of SEQ ID NO: 1889201
gagaguaguuagguuuaaa

SEQ ID NO: 2584923 - RNA, 19 nt, Artificial Sequence
  Description of Artificial Sequence: Synthetic oligonucleotide
  Antisense strand to SEQ ID NO: 2584922
uuuaaaccuaacuacucuc

SEQ ID NO: 2584924 - RNA, 19 nt, Artificial Sequence
  Description of Artificial Sequence: Synthetic oligonucleotide
  Sense strand starting at position 2236 of SEQ ID NO: 1889201
guaccugacgcugaauacu

SEQ ID NO: 2584925 - RNA, 19 nt, Artificial Sequence
  Description of Artificial Sequence: Synthetic oligonucleotide
  Antisense strand to SEQ ID NO: 2584924
aguauucagcgucagguac

SEQ ID NO: 2584926 - RNA, 19 nt, Artificial Sequence
  Description of Artificial Sequence: Synthetic oligonucleotide
  Sense strand starting at position 2341 of SEQ ID NO: 1889201
uuugguguggcugauugaa

SEQ ID NO: 2584927 - RNA, 19 nt, Artificial Sequence
  Description of Artificial Sequence: Synthetic oligonucleotide
  Antisense strand to SEQ ID NO: 2584926
uucaaucagccacaccaaa

SEQ ID NO: 2584928 - RNA, 19 nt, Artificial Sequence
  Description of Artificial Sequence: Synthetic oligonucleotide
  Sense strand starting at position 2967 of SEQ ID NO: 1889201
uuaucaguucccuaauagu

SEQ ID NO: 2584929 - RNA, 19 nt, Artificial Sequence
  Description of Artificial Sequence: Synthetic oligonucleotide
  Antisense strand to SEQ ID NO: 2584928
acuauuagggaacugauaa

SEQ ID NO: 2584930 - RNA, 19 nt, Artificial Sequence
  Description of Artificial Sequence: Synthetic oligonucleotide
  Sense strand starting at position 3085 of SEQ ID NO: 1889201
uugauuguaacauaugugu

SEQ ID NO: 2584931 - RNA, 19 nt, Artificial Sequence
  Description of Artificial Sequence: Synthetic oligonucleotide
  Antisense strand to SEQ ID NO: 2584930
acacauauguuacaaucaa

SEQ ID NO: 2584932 - RNA, 19 nt, Artificial Sequence
  Description of Artificial Sequence: Synthetic oligonucleotide
  Sense strand starting at position 3250 of SEQ ID NO: 1889201
gacuauaaaugugcaggua

SEQ ID NO: 2584933 - RNA, 19 nt, Artificial Sequence
  Description of Artificial Sequence: Synthetic oligonucleotide
  Antisense strand to SEQ ID NO: 2584932
uaccugcacauuuauaguc

SEQ ID NO: 2584934 - RNA, 19 nt, Artificial Sequence
  Description of Artificial Sequence: Synthetic oligonucleotide
  Sense strand starting at position 3251 of SEQ ID NO: 1889201
acuauaaaugugcagguau

SEQ ID NO: 2584935 - RNA, 19 nt, Artificial Sequence
  Description of Artificial Sequence: Synthetic oligonucleotide
  Antisense strand to SEQ ID NO: 2584934
auaccugcacauuuauagu

SEQ ID NO: 2584936 - RNA, 19 nt, Artificial Sequence
  Description of Artificial Sequence: Synthetic oligonucleotide
  Sense strand starting at position 3253 of SEQ ID NO: 1889201
uauaaaugugcagguauga

SEQ ID NO: 2584937 - RNA, 19 nt, Artificial Sequence
  Description of Artificial Sequence: Synthetic oligonucleotide
  Antisense strand to SEQ ID NO: 2584936
ucauaccugcacauuuaua

SEQ ID NO: 2584938 - RNA, 19 nt, Artificial Sequence
  Description of Artificial Sequence: Synthetic oligonucleotide
  Sense strand starting at position 3779 of SEQ ID NO: 1889201
ggguccuaccuguauguga

SEQ ID NO: 2584939 - RNA, 19 nt, Artificial Sequence
  Description of Artificial Sequence: Synthetic oligonucleotide
  Antisense strand to SEQ ID NO: 2584938
ucacauacagguaggaccc

SEQ ID NO: 2584940 - RNA, 19 nt, Artificial Sequence
  Description of Artificial Sequence: Synthetic oligonucleotide
  Sense strand starting at position 441 of SEQ ID NO: 1889202
aauguuggacucugaaugu

SEQ ID NO: 2584941 - RNA, 19 nt, Artificial Sequence
  Description of Artificial Sequence: Synthetic oligonucleotide
  Antisense strand to SEQ ID NO: 2584940
acauucagaguccaacauu

SEQ ID NO: 2584942 - RNA, 19 nt, Artificial Sequence
  Description of Artificial Sequence: Synthetic oligonucleotide
  Sense strand starting at position 445 of SEQ ID NO: 1889202
uuggacucugaauguuauu

SEQ ID NO: 2584943 - RNA, 19 nt, Artificial Sequence
  Description of Artificial Sequence: Synthetic oligonucleotide
  Antisense strand to SEQ ID NO: 2584942
aauaacauucagaguccaa

SEQ ID NO: 2584944 - RNA, 19 nt, Artificial Sequence
  Description of Artificial Sequence: Synthetic oligonucleotide
  Sense strand starting at position 457 of SEQ ID NO: 1889202
uguuauuccgaggaguuuc

SEQ ID NO: 2584945 - RNA, 19 nt, Artificial Sequence
  Description of Artificial Sequence: Synthetic oligonucleotide
  Antisense strand to SEQ ID NO: 2584944
gaaacuccucggaauaaca

SEQ ID NO: 2584946 - RNA, 19 nt, Artificial Sequence
  Description of Artificial Sequence: Synthetic oligonucleotide
  Sense strand starting at position 514 of SEQ ID NO: 1889202
gcauauuaccagcaugaac

SEQ ID NO: 2584947 - RNA, 19 nt, Artificial Sequence
  Description of Artificial Sequence: Synthetic oligonucleotide
  Antisense strand to SEQ ID NO: 2584946
guucaugcugguaauaugc

SEQ ID NO: 2584948 - RNA, 19 nt, Artificial Sequence
  Description of Artificial Sequence: Synthetic oligonucleotide
  Sense strand starting at position 554 of SEQ ID NO: 1889202
aaacuugagugauuagagu

SEQ ID NO: 2584949 - RNA, 19 nt, Artificial Sequence
  Description of Artificial Sequence: Synthetic oligonucleotide
  Antisense strand to SEQ ID NO: 2584948
acucuaaucacucaaguuu

SEQ ID NO: 2584950 - RNA, 19 nt, Artificial Sequence
  Description of Artificial Sequence: Synthetic oligonucleotide
  Sense strand starting at position 942 of SEQ ID NO: 1889202
uggaaacaugacugguguu

SEQ ID NO: 2584951 - RNA, 19 nt, Artificial Sequence
  Description of Artificial Sequence: Synthetic oligonucleotide
  Antisense strand to SEQ ID NO: 2584950
aacaccagucauguuucca

SEQ ID NO: 2584952 - RNA, 19 nt, Artificial Sequence
  Description of Artificial Sequence: Synthetic oligonucleotide
  Sense strand starting at position 971 of SEQ ID NO: 1889202
gcagacuagagagguugau

SEQ ID NO: 2584953 - RNA, 19 nt, Artificial Sequence
  Description of Artificial Sequence: Synthetic oligonucleotide
  Antisense strand to SEQ ID NO: 2584952
aucaaccucucuagucugc

SEQ ID NO: 2584954 - RNA, 19 nt, Artificial Sequence
  Description of Artificial Sequence: Synthetic oligonucleotide
  Sense strand starting at position 1003 of SEQ ID NO: 1889202
gggauuuauuuaugugcac

SEQ ID NO: 2584955 - RNA, 19 nt, Artificial Sequence
  Description of Artificial Sequence: Synthetic oligonucleotide
  Antisense strand to SEQ ID NO: 2584954
gugcacauaaauaaauccc

SEQ ID NO: 2584956 - RNA, 19 nt, Artificial Sequence
  Description of Artificial Sequence: Synthetic oligonucleotide
  Sense strand starting at position 1107 of SEQ ID NO: 1889202
aguaaagcaguugauuaua

SEQ ID NO: 2584957 - RNA, 19 nt, Artificial Sequence
  Description of Artificial Sequence: Synthetic oligonucleotide
  Antisense strand to SEQ ID NO: 2584956
uauaaucaacugcuuuacu

SEQ ID NO: 2584958 - RNA, 19 nt, Artificial Sequence
  Description of Artificial Sequence: Synthetic oligonucleotide
  Sense strand starting at position 1198 of SEQ ID NO: 1889202
ugcagcuguguugaaagaa

SEQ ID NO: 2584959 - RNA, 19 nt, Artificial Sequence
  Description of Artificial Sequence: Synthetic oligonucleotide
  Antisense strand to SEQ ID NO: 2584958
uucuuucaacacagcugca

SEQ ID NO: 2584960 - RNA, 19 nt, Artificial Sequence
  Description of Artificial Sequence: Synthetic oligonucleotide
  Sense strand starting at position 1317 of SEQ ID NO: 1889202
ucaacuuugcuccaguaag

SEQ ID NO: 2584961 - RNA, 19 nt, Artificial Sequence
  Description of Artificial Sequence: Synthetic oligonucleotide
  Antisense strand to SEQ ID NO: 2584960
cuuacuggagcaaaguuga

SEQ ID NO: 2584962 - RNA, 19 nt, Artificial Sequence
  Description of Artificial Sequence: Synthetic oligonucleotide
  Sense strand starting at position 1388 of SEQ ID NO: 1889202
augacuguccuugaaguga

SEQ ID NO: 2584963 - RNA, 19 nt, Artificial Sequence
  Description of Artificial Sequence: Synthetic oligonucleotide
  Antisense strand to SEQ ID NO: 2584962
ucacuucaaggacagucau

SEQ ID NO: 2584964 - RNA, 19 nt, Artificial Sequence
  Description of Artificial Sequence: Synthetic oligonucleotide
  Sense strand starting at position 1483 of SEQ ID NO: 1889202
ugauaccauuuauaggaga

SEQ ID NO: 2584965 - RNA, 19 nt, Artificial Sequence
  Description of Artificial Sequence: Synthetic oligonucleotide
  Antisense strand to SEQ ID NO: 2584964
ucuccuauaaaugguauca

SEQ ID NO: 2584966 - RNA, 19 nt, Artificial Sequence
  Description of Artificial Sequence: Synthetic oligonucleotide
  Sense strand starting at position 1553 of SEQ ID NO: 1889202
uucuucuuuggucaaaggu

SEQ ID NO: 2584967 - RNA, 19 nt, Artificial Sequence
  Description of Artificial Sequence: Synthetic oligonucleotide
  Antisense strand to SEQ ID NO: 2584966
accuuugaccaaagaagaa

SEQ ID NO: 2584968 - RNA, 19 nt, Artificial Sequence
  Description of Artificial Sequence: Synthetic oligonucleotide
  Sense strand starting at position 1560 of SEQ ID NO: 1889202
uuggucaaagguugauauu

SEQ ID NO: 2584969 - RNA, 19 nt, Artificial Sequence
  Description of Artificial Sequence: Synthetic oligonucleotide
  Antisense strand to SEQ ID NO: 2584968
aauaucaaccuuugaccaa

SEQ ID NO: 2584970 - RNA, 19 nt, Artificial Sequence
  Description of Artificial Sequence: Synthetic oligonucleotide
  Sense strand starting at position 1563 of SEQ ID NO: 1889202
gucaaagguugauauuuag

SEQ ID NO: 2584971 - RNA, 19 nt, Artificial Sequence
  Description of Artificial Sequence: Synthetic oligonucleotide
  Antisense strand to SEQ ID NO: 2584970
cuaaauaucaaccuuugac

SEQ ID NO: 2584972 - RNA, 19 nt, Artificial Sequence
  Description of Artificial Sequence: Synthetic oligonucleotide
  Sense strand starting at position 1577 of SEQ ID NO: 1889202
uuuaguuagggcuauuaac

SEQ ID NO: 2584973 - RNA, 19 nt, Artificial Sequence
  Description of Artificial Sequence: Synthetic oligonucleotide
  Antisense strand to SEQ ID NO: 2584972
guuaauagcccuaacuaaa

SEQ ID NO: 2584974 - RNA, 19 nt, Artificial Sequence
  Description of Artificial Sequence: Synthetic oligonucleotide
  Sense strand starting at position 1588 of SEQ ID NO: 1889202
cuauuaacucaguagcagu

SEQ ID NO: 2584975 - RNA, 19 nt, Artificial Sequence
  Description of Artificial Sequence: Synthetic oligonucleotide
  Antisense strand to SEQ ID NO: 2584974
acugcuacugaguuaauag

SEQ ID NO: 2584976 - RNA, 19 nt, Artificial Sequence
  Description of Artificial Sequence: Synthetic oligonucleotide
  Sense strand starting at position 1640 of SEQ ID NO: 1889202
auguguagaaguugggaau

SEQ ID NO: 2584977 - RNA, 19 nt, Artificial Sequence
  Description of Artificial Sequence: Synthetic oligonucleotide
  Antisense strand to SEQ ID NO: 2584976
auucccaacuucuacacau

SEQ ID NO: 2584978 - RNA, 19 nt, Artificial Sequence
  Description of Artificial Sequence: Synthetic oligonucleotide
  Sense strand starting at position 1710 of SEQ ID NO: 1889202
caaagcaaugaguagcaua

SEQ ID NO: 2584979 - RNA, 19 nt, Artificial Sequence
  Description of Artificial Sequence: Synthetic oligonucleotide
  Antisense strand to SEQ ID NO: 2584978
uaugcuacucauugcuuug

SEQ ID NO: 2584980 - RNA, 19 nt, Artificial Sequence
  Description of Artificial Sequence: Synthetic oligonucleotide
  Sense strand starting at position 1718 of SEQ ID NO: 1889202
ugaguagcauauuuauguu

SEQ ID NO: 2584981 - RNA, 19 nt, Artificial Sequence
  Description of Artificial Sequence: Synthetic oligonucleotide
  Antisense strand to SEQ ID NO: 2584980
aacauaaauaugcuacuca

SEQ ID NO: 2584982 - RNA, 19 nt, Artificial Sequence
  Description of Artificial Sequence: Synthetic oligonucleotide
  Sense strand starting at position 1724 of SEQ ID NO: 1889202
gcauauuuauguuuagugu

SEQ ID NO: 2584983 - RNA, 19 nt, Artificial Sequence
  Description of Artificial Sequence: Synthetic oligonucleotide
  Antisense strand to SEQ ID NO: 2584982
acacuaaacauaaauaugc

SEQ ID NO: 2584984 - RNA, 19 nt, Artificial Sequence
  Description of Artificial Sequence: Synthetic oligonucleotide
  Sense strand starting at position 1767 of SEQ ID NO: 1889202
ggaggagguugaguauagu

SEQ ID NO: 2584985 - RNA, 19 nt, Artificial Sequence
  Description of Artificial Sequence: Synthetic oligonucleotide
  Antisense strand to SEQ ID NO: 2584984
acuauacucaaccuccucc

SEQ ID NO: 2584986 - RNA, 19 nt, Artificial Sequence
  Description of Artificial Sequence: Synthetic oligonucleotide
  Sense strand starting at position 1849 of SEQ ID NO: 1889202
uuuaacuugccugaugagu

SEQ ID NO: 2584987 - RNA, 19 nt, Artificial Sequence
  Description of Artificial Sequence: Synthetic oligonucleotide
  Antisense strand to SEQ ID NO: 2584986
acucaucaggcaaguuaaa

SEQ ID NO: 2584988 - RNA, 19 nt, Artificial Sequence
  Description of Artificial Sequence: Synthetic oligonucleotide
  Sense strand starting at position 1995 of SEQ ID NO: 1889202
guuguucucagugacaacu

SEQ ID NO: 2584989 - RNA, 19 nt, Artificial Sequence
  Description of Artificial Sequence: Synthetic oligonucleotide
  Antisense strand to SEQ ID NO: 2584988
aguugucacugagaacaac

SEQ ID NO: 2584990 - RNA, 19 nt, Artificial Sequence
  Description of Artificial Sequence: Synthetic oligonucleotide
  Sense strand starting at position 2024 of SEQ ID NO: 1889202
gcaugauuagcugccuguu

SEQ ID NO: 2584991 - RNA, 19 nt, Artificial Sequence
  Description of Artificial Sequence: Synthetic oligonucleotide
  Antisense strand to SEQ ID NO: 2584990
aacaggcagcuaaucaugc

SEQ ID NO: 2584992 - RNA, 19 nt, Artificial Sequence
  Description of Artificial Sequence: Synthetic oligonucleotide
  Sense strand starting at position 2062 of SEQ ID NO: 1889202
cgauuaaggcaugauuccu

SEQ ID NO: 2584993 - RNA, 19 nt, Artificial Sequence
  Description of Artificial Sequence: Synthetic oligonucleotide
  Antisense strand to SEQ ID NO: 2584992
aggaaucaugccuuaaucg

SEQ ID NO: 2584994 - RNA, 19 nt, Artificial Sequence
  Description of Artificial Sequence: Synthetic oligonucleotide
  Sense strand starting at position 2171 of SEQ ID NO: 1889202
caaagagaguaguuagguu

SEQ ID NO: 2584995 - RNA, 19 nt, Artificial Sequence
  Description of Artificial Sequence: Synthetic oligonucleotide
  Antisense strand to SEQ ID NO: 2584994
aaccuaacuacucucuuug

SEQ ID NO: 2584996 - RNA, 19 nt, Artificial Sequence
  Description of Artificial Sequence: Synthetic oligonucleotide
  Sense strand starting at position 2175 of SEQ ID NO: 1889202
gagaguaguuagguuuaaa

SEQ ID NO: 2584997 - RNA, 19 nt, Artificial Sequence
  Description of Artificial Sequence: Synthetic oligonucleotide
  Antisense strand to SEQ ID NO: 2584996
uuuaaaccuaacuacucuc

SEQ ID NO: 2584998 - RNA, 19 nt, Artificial Sequence
  Description of Artificial Sequence: Synthetic oligonucleotide
  Sense strand starting at position 2235 of SEQ ID NO: 1889202
guaccugacgcugaauacu

SEQ ID NO: 2584999 - RNA, 19 nt, Artificial Sequence
  Description of Artificial Sequence: Synthetic oligonucleotide
  Antisense strand to SEQ ID NO: 2584998
aguauucagcgucagguac

SEQ ID NO: 2585000 - RNA, 19 nt, Artificial Sequence
  Description of Artificial Sequence: Synthetic oligonucleotide
  Sense strand starting at position 2340 of SEQ ID NO: 1889202
uuugguguggcugauugaa

SEQ ID NO: 2585001 - RNA, 19 nt, Artificial Sequence
  Description of Artificial Sequence: Synthetic oligonucleotide
  Antisense strand to SEQ ID NO: 2585000
uucaaucagccacaccaaa

SEQ ID NO: 2585002 - RNA, 19 nt, Artificial Sequence
  Description of Artificial Sequence: Synthetic oligonucleotide
  Sense strand starting at position 2966 of SEQ ID NO: 1889202
uuaucaguucccuaauagu

SEQ ID NO: 2585003 - RNA, 19 nt, Artificial Sequence
  Description of Artificial Sequence: Synthetic oligonucleotide
  Antisense strand to SEQ ID NO: 2585002
acuauuagggaacugauaa

SEQ ID NO: 2585004 - RNA, 19 nt, Artificial Sequence
  Description of Artificial Sequence: Synthetic oligonucleotide
  Sense strand starting at position 3084 of SEQ ID NO: 1889202
uugauuguaacauaugugu

SEQ ID NO: 2585005 - RNA, 19 nt, Artificial Sequence
  Description of Artificial Sequence: Synthetic oligonucleotide
  Antisense strand to SEQ ID NO: 2585004
acacauauguuacaaucaa

SEQ ID NO: 2585006 - RNA, 19 nt, Artificial Sequence
  Description of Artificial Sequence: Synthetic oligonucleotide
  Sense strand starting at position 3249 of SEQ ID NO: 1889202
gacuauaaaugugcaggua

SEQ ID NO: 2585007 - RNA, 19 nt, Artificial Sequence
  Description of Artificial Sequence: Synthetic oligonucleotide
  Antisense strand to SEQ ID NO: 2585006
uaccugcacauuuauaguc

SEQ ID NO: 2585008 - RNA, 19 nt, Artificial Sequence
  Description of Artificial Sequence: Synthetic oligonucleotide
  Sense strand starting at position 3250 of SEQ ID NO: 1889202
acuauaaaugugcagguau

SEQ ID NO: 2585009 - RNA, 19 nt, Artificial Sequence
  Description of Artificial Sequence: Synthetic oligonucleotide
  Antisense strand to SEQ ID NO: 2585008
auaccugcacauuuauagu

SEQ ID NO: 2585010 - RNA, 19 nt, Artificial Sequence
  Description of Artificial Sequence: Synthetic oligonucleotide
  Sense strand starting at position 3252 of SEQ ID NO: 1889202
uauaaaugugcagguauga

SEQ ID NO: 2585011 - RNA, 19 nt, Artificial Sequence
  Description of Artificial Sequence: Synthetic oligonucleotide
  Antisense strand to SEQ ID NO: 2585010
ucauaccugcacauuuaua

SEQ ID NO: 2585012 - RNA, 19 nt, Artificial Sequence
  Description of Artificial Sequence: Synthetic oligonucleotide
  Sense strand starting at position 3629 of SEQ ID NO: 1889202
cuuuauuggccucagaaga

SEQ ID NO: 2585013 - RNA, 19 nt, Artificial Sequence
  Description of Artificial Sequence: Synthetic oligonucleotide
  Antisense strand to SEQ ID NO: 2585012
ucuucugaggccaauaaag

SEQ ID NO: 2585014 - RNA, 19 nt, Artificial Sequence
  Description of Artificial Sequence: Synthetic oligonucleotide
  Sense strand starting at position 3637 of SEQ ID NO: 1889202
gccucagaagaaugugauc

SEQ ID NO: 2585015 - RNA, 19 nt, Artificial Sequence
  Description of Artificial Sequence: Synthetic oligonucleotide
  Antisense strand to SEQ ID NO: 2585014
gaucacauucuucugaggc

SEQ ID NO: 2585016 - RNA, 19 nt, Artificial Sequence
  Description of Artificial Sequence: Synthetic oligonucleotide
  Sense strand starting at position 3642 of SEQ ID NO: 1889202
agaagaaugugaucuuugu

SEQ ID NO: 2585017 - RNA, 19 nt, Artificial Sequence
  Description of Artificial Sequence: Synthetic oligonucleotide
  Antisense strand to SEQ ID NO: 2585016
acaaagaucacauucuucu

SEQ ID NO: 2585018 - RNA, 19 nt, Artificial Sequence
  Description of Artificial Sequence: Synthetic oligonucleotide
  Sense strand starting at position 3778 of SEQ ID NO: 1889202
ggguccuaccuguauguga

SEQ ID NO: 2585019 - RNA, 19 nt, Artificial Sequence
  Description of Artificial Sequence: Synthetic oligonucleotide
  Antisense strand to SEQ ID NO: 2585018
ucacauacagguaggaccc

SEQ ID NO: 2585020 - RNA, 19 nt, Artificial Sequence
  Description of Artificial Sequence: Synthetic oligonucleotide
  Sense strand starting at position 183 of SEQ ID NO: 1889203
aagacuagauuggaagaau

SEQ ID NO: 2585021 - RNA, 19 nt, Artificial Sequence
  Description of Artificial Sequence: Synthetic oligonucleotide
  Antisense strand to SEQ ID NO: 2585020
auucuuccaaucuagucuu

SEQ ID NO: 2585022 - RNA, 19 nt, Artificial Sequence
  Description of Artificial Sequence: Synthetic oligonucleotide
  Sense strand starting at position 382 of SEQ ID NO: 1889203
aguuacucccuguaacuau

SEQ ID NO: 2585023 - RNA, 19 nt, Artificial Sequence
  Description of Artificial Sequence: Synthetic oligonucleotide
  Antisense strand to SEQ ID NO: 2585022
auaguuacagggaguaacu

SEQ ID NO: 2585024 - RNA, 19 nt, Artificial Sequence
  Description of Artificial Sequence: Synthetic oligonucleotide
  Sense strand starting at position 407 of SEQ ID NO: 1889203
cugugaaguaggcaauaca

SEQ ID NO: 2585025 - RNA, 19 nt, Artificial Sequence
  Description of Artificial Sequence: Synthetic oligonucleotide
  Antisense strand to SEQ ID NO: 2585024
uguauugccuacuucacag

SEQ ID NO: 2585026 - RNA, 19 nt, Artificial Sequence
  Description of Artificial Sequence: Synthetic oligonucleotide
  Sense strand starting at position 418 of SEQ ID NO: 1889203
gcaauacaguuguuaaaga

SEQ ID NO: 2585027 - RNA, 19 nt, Artificial Sequence
  Description of Artificial Sequence: Synthetic oligonucleotide
  Antisense strand to SEQ ID NO: 2585026
ucuuuaacaacuguauugc

SEQ ID NO: 2585028 - RNA, 19 nt, Artificial Sequence
  Description of Artificial Sequence: Synthetic oligonucleotide
  Sense strand starting at position 442 of SEQ ID NO: 1889203
aauguuggacucugaaugu

SEQ ID NO: 2585029 - RNA, 19 nt, Artificial Sequence
  Description of Artificial Sequence: Synthetic oligonucleotide
  Antisense strand to SEQ ID NO: 2585028
acauucagaguccaacauu

SEQ ID NO: 2585030 - RNA, 19 nt, Artificial Sequence
  Description of Artificial Sequence: Synthetic oligonucleotide
  Sense strand starting at position 446 of SEQ ID NO: 1889203
uuggacucugaauguuauu

SEQ ID NO: 2585031 - RNA, 19 nt, Artificial Sequence
  Description of Artificial Sequence: Synthetic oligonucleotide
  Antisense strand to SEQ ID NO: 2585030
aauaacauucagaguccaa

SEQ ID NO: 2585032 - RNA, 19 nt, Artificial Sequence
  Description of Artificial Sequence: Synthetic oligonucleotide
  Sense strand starting at position 515 of SEQ ID NO: 1889203
gcauauuaccagcaugaac

SEQ ID NO: 2585033 - RNA, 19 nt, Artificial Sequence
  Description of Artificial Sequence: Synthetic oligonucleotide
  Antisense strand to SEQ ID NO: 2585032
guucaugcugguaauaugc

SEQ ID NO: 2585034 - RNA, 19 nt, Artificial Sequence
  Description of Artificial Sequence: Synthetic oligonucleotide
  Sense strand starting at position 555 of SEQ ID NO: 1889203
aaacuugagugauuagagu

SEQ ID NO: 2585035 - RNA, 19 nt, Artificial Sequence
  Description of Artificial Sequence: Synthetic oligonucleotide
  Antisense strand to SEQ ID NO: 2585034
acucuaaucacucaaguuu

SEQ ID NO: 2585036 - RNA, 19 nt, Artificial Sequence
  Description of Artificial Sequence: Synthetic oligonucleotide
  Sense strand starting at position 943 of SEQ ID NO: 1889203
uggaaacaugacugguguu

SEQ ID NO: 2585037 - RNA, 19 nt, Artificial Sequence
  Description of Artificial Sequence: Synthetic oligonucleotide
  Antisense strand to SEQ ID NO: 2585036
aacaccagucauguuucca

SEQ ID NO: 2585038 - RNA, 19 nt, Artificial Sequence
  Description of Artificial Sequence: Synthetic oligonucleotide
  Sense strand starting at position 972 of SEQ ID NO: 1889203
gcagacuagagagguugau

SEQ ID NO: 2585039 - RNA, 19 nt, Artificial Sequence
  Description of Artificial Sequence: Synthetic oligonucleotide
  Antisense strand to SEQ ID NO: 2585038
aucaaccucucuagucugc

SEQ ID NO: 2585040 - RNA, 19 nt, Artificial Sequence
  Description of Artificial Sequence: Synthetic oligonucleotide
  Sense strand starting at position 1004 of SEQ ID NO: 1889203
gggauuuauuuaugugcac

SEQ ID NO: 2585041 - RNA, 19 nt, Artificial Sequence
  Description of Artificial Sequence: Synthetic oligonucleotide
  Antisense strand to SEQ ID NO: 2585040
gugcacauaaauaaauccc

SEQ ID NO: 2585042 - RNA, 19 nt, Artificial Sequence
  Description of Artificial Sequence: Synthetic oligonucleotide
  Sense strand starting at position 1108 of SEQ ID NO: 1889203
aguaaagcaguugauuaua

SEQ ID NO: 2585043 - RNA, 19 nt, Artificial Sequence
  Description of Artificial Sequence: Synthetic oligonucleotide
  Antisense strand to SEQ ID NO: 2585042
uauaaucaacugcuuuacu

SEQ ID NO: 2585044 - RNA, 19 nt, Artificial Sequence
  Description of Artificial Sequence: Synthetic oligonucleotide
  Sense strand starting at position 1199 of SEQ ID NO: 1889203
ugcagcuguguugaaagaa

SEQ ID NO: 2585045 - RNA, 19 nt, Artificial Sequence
  Description of Artificial Sequence: Synthetic oligonucleotide
  Antisense strand to SEQ ID NO: 2585044
uucuuucaacacagcugca

SEQ ID NO: 2585046 - RNA, 19 nt, Artificial Sequence
  Description of Artificial Sequence: Synthetic oligonucleotide
  Sense strand starting at position 1318 of SEQ ID NO: 1889203
ucaacuuugcuccaguaag

SEQ ID NO: 2585047 - RNA, 19 nt, Artificial Sequence
  Description of Artificial Sequence: Synthetic oligonucleotide
  Antisense strand to SEQ ID NO: 2585046
cuuacuggagcaaaguuga

SEQ ID NO: 2585048 - RNA, 19 nt, Artificial Sequence
  Description of Artificial Sequence: Synthetic oligonucleotide
  Sense strand starting at position 1389 of SEQ ID NO: 1889203
augacuguccuugaaguga

SEQ ID NO: 2585049 - RNA, 19 nt, Artificial Sequence
  Description of Artificial Sequence: Synthetic oligonucleotide
  Antisense strand to SEQ ID NO: 2585048
ucacuucaaggacagucau

SEQ ID NO: 2585050 - RNA, 19 nt, Artificial Sequence
  Description of Artificial Sequence: Synthetic oligonucleotide
  Sense strand starting at position 1484 of SEQ ID NO: 1889203
ugauaccauuuauaggaga

SEQ ID NO: 2585051 - RNA, 19 nt, Artificial Sequence
  Description of Artificial Sequence: Synthetic oligonucleotide
  Antisense strand to SEQ ID NO: 2585050
ucuccuauaaaugguauca

SEQ ID NO: 2585052 - RNA, 19 nt, Artificial Sequence
  Description of Artificial Sequence: Synthetic oligonucleotide
  Sense strand starting at position 1554 of SEQ ID NO: 1889203
uucuucuuuggucaaaggu

SEQ ID NO: 2585053 - RNA, 19 nt, Artificial Sequence
  Description of Artificial Sequence: Synthetic oligonucleotide
  Antisense strand to SEQ ID NO: 2585052
accuuugaccaaagaagaa

SEQ ID NO: 2585054 - RNA, 19 nt, Artificial Sequence
  Description of Artificial Sequence: Synthetic oligonucleotide
  Sense strand starting at position 1561 of SEQ ID NO: 1889203
uuggucaaagguugauauu

SEQ ID NO: 2585055 - RNA, 19 nt, Artificial Sequence
  Description of Artificial Sequence: Synthetic oligonucleotide
  Antisense strand to SEQ ID NO: 2585054
aauaucaaccuuugaccaa

SEQ ID NO: 2585056 - RNA, 19 nt, Artificial Sequence
  Description of Artificial Sequence: Synthetic oligonucleotide
  Sense strand starting at position 1564 of SEQ ID NO: 1889203
gucaaagguugauauuuag

SEQ ID NO: 2585057 - RNA, 19 nt, Artificial Sequence
  Description of Artificial Sequence: Synthetic oligonucleotide
  Antisense strand to SEQ ID NO: 2585056
cuaaauaucaaccuuugac

SEQ ID NO: 2585058 - RNA, 19 nt, Artificial Sequence
  Description of Artificial Sequence: Synthetic oligonucleotide
  Sense strand starting at position 1578 of SEQ ID NO: 1889203
uuuaguuagggcuauuaac

SEQ ID NO: 2585059 - RNA, 19 nt, Artificial Sequence
  Description of Artificial Sequence: Synthetic oligonucleotide
  Antisense strand to SEQ ID NO: 2585058
guuaauagcccuaacuaaa

SEQ ID NO: 2585060 - RNA, 19 nt, Artificial Sequence
  Description of Artificial Sequence: Synthetic oligonucleotide
  Sense strand starting at position 1589 of SEQ ID NO: 1889203
cuauuaacucaguagcagu

SEQ ID NO: 2585061 - RNA, 19 nt, Artificial Sequence
  Description of Artificial Sequence: Synthetic oligonucleotide
  Antisense strand to SEQ ID NO: 2585060
acugcuacugaguuaauag

SEQ ID NO: 2585062 - RNA, 19 nt, Artificial Sequence
  Description of Artificial Sequence: Synthetic oligonucleotide
  Sense strand starting at position 1641 of SEQ ID NO: 1889203
auguguagaaguugggaau

SEQ ID NO: 2585063 - RNA, 19 nt, Artificial Sequence
  Description of Artificial Sequence: Synthetic oligonucleotide
  Antisense strand to SEQ ID NO: 2585062
auucccaacuucuacacau

SEQ ID NO: 2585064 - RNA, 19 nt, Artificial Sequence
  Description of Artificial Sequence: Synthetic oligonucleotide
  Sense strand starting at position 1711 of SEQ ID NO: 1889203
caaagcaaugaguagcaua

SEQ ID NO: 2585065 - RNA, 19 nt, Artificial Sequence
  Description of Artificial Sequence: Synthetic oligonucleotide
  Antisense strand to SEQ ID NO: 2585064
uaugcuacucauugcuuug

SEQ ID NO: 2585066 - RNA, 19 nt, Artificial Sequence
  Description of Artificial Sequence: Synthetic oligonucleotide
  Sense strand starting at position 1719 of SEQ ID NO: 1889203
ugaguagcauauuuauguu

SEQ ID NO: 2585067 - RNA, 19 nt, Artificial Sequence
  Description of Artificial Sequence: Synthetic oligonucleotide
  Antisense strand to SEQ ID NO: 2585066
aacauaaauaugcuacuca

SEQ ID NO: 2585068 - RNA, 19 nt, Artificial Sequence
  Description of Artificial Sequence: Synthetic oligonucleotide
  Sense strand starting at position 1725 of SEQ ID NO: 1889203
gcauauuuauguuuagugu

SEQ ID NO: 2585069 - RNA, 19 nt, Artificial Sequence
  Description of Artificial Sequence: Synthetic oligonucleotide
  Antisense strand to SEQ ID NO: 2585068
acacuaaacauaaauaugc

SEQ ID NO: 2585070 - RNA, 19 nt, Artificial Sequence
  Description of Artificial Sequence: Synthetic oligonucleotide
  Sense strand starting at position 1768 of SEQ ID NO: 1889203
ggaggagguugaguauagu

SEQ ID NO: 2585071 - RNA, 19 nt, Artificial Sequence
  Description of Artificial Sequence: Synthetic oligonucleotide
  Antisense strand to SEQ ID NO: 2585070
acuauacucaaccuccucc

SEQ ID NO: 2585072 - RNA, 19 nt, Artificial Sequence
  Description of Artificial Sequence: Synthetic oligonucleotide
  Sense strand starting at position 1850 of SEQ ID NO: 1889203
uuuaacuugccugaugagu

SEQ ID NO: 2585073 - RNA, 19 nt, Artificial Sequence
  Description of Artificial Sequence: Synthetic oligonucleotide
  Antisense strand to SEQ ID NO: 2585072
acucaucaggcaaguuaaa

SEQ ID NO: 2585074 - RNA, 19 nt, Artificial Sequence
  Description of Artificial Sequence: Synthetic oligonucleotide
  Sense strand starting at position 1996 of SEQ ID NO: 1889203
guuguucucagugacaacu

SEQ ID NO: 2585075 - RNA, 19 nt, Artificial Sequence
  Description of Artificial Sequence: Synthetic oligonucleotide
  Antisense strand to SEQ ID NO: 2585074
aguugucacugagaacaac

SEQ ID NO: 2585076 - RNA, 19 nt, Artificial Sequence
  Description of Artificial Sequence: Synthetic oligonucleotide
  Sense strand starting at position 2025 of SEQ ID NO: 1889203
gcaugauuagcugccuguu

SEQ ID NO: 2585077 - RNA, 19 nt, Artificial Sequence
  Description of Artificial Sequence: Synthetic oligonucleotide
  Antisense strand to SEQ ID NO: 2585076
aacaggcagcuaaucaugc

SEQ ID NO: 2585078 - RNA, 19 nt, Artificial Sequence
  Description of Artificial Sequence: Synthetic oligonucleotide
  Sense strand starting at position 2063 of SEQ ID NO: 1889203
cgauuaaggcaugauuccu

SEQ ID NO: 2585079 - RNA, 19 nt, Artificial Sequence
  Description of Artificial Sequence: Synthetic oligonucleotide
  Antisense strand to SEQ ID NO: 2585078
aggaaucaugccuuaaucg

SEQ ID NO: 2585080 - RNA, 19 nt, Artificial Sequence
  Description of Artificial Sequence: Synthetic oligonucleotide
  Sense strand starting at position 2172 of SEQ ID NO: 1889203
caaagagaguaguuagguu

SEQ ID NO: 2585081 - RNA, 19 nt, Artificial Sequence
  Description of Artificial Sequence: Synthetic oligonucleotide
  Antisense strand to SEQ ID NO: 2585080
aaccuaacuacucucuuug

SEQ ID NO: 2585082 - RNA, 19 nt, Artificial Sequence
  Description of Artificial Sequence: Synthetic oligonucleotide
  Sense strand starting at position 2176 of SEQ ID NO: 1889203
gagaguaguuagguuuaaa

SEQ ID NO: 2585083 - RNA, 19 nt, Artificial Sequence
  Description of Artificial Sequence: Synthetic oligonucleotide
  Antisense strand to SEQ ID NO: 2585082
uuuaaaccuaacuacucuc

SEQ ID NO: 2585084 - RNA, 19 nt, Artificial Sequence
  Description of Artificial Sequence: Synthetic oligonucleotide
  Sense strand starting at position 2236 of SEQ ID NO: 1889203
guaccugacgcugaauacu

SEQ ID NO: 2585085 - RNA, 19 nt, Artificial Sequence
  Description of Artificial Sequence: Synthetic oligonucleotide
  Antisense strand to SEQ ID NO: 2585084
aguauucagcgucagguac

SEQ ID NO: 2585086 - RNA, 19 nt, Artificial Sequence
  Description of Artificial Sequence: Synthetic oligonucleotide
  Sense strand starting at position 2341 of SEQ ID NO: 1889203
uuugguguggcugauugaa

SEQ ID NO: 2585087 - RNA, 19 nt, Artificial Sequence
  Description of Artificial Sequence: Synthetic oligonucleotide
  Antisense strand to SEQ ID NO: 2585086
uucaaucagccacaccaaa

SEQ ID NO: 2585088 - RNA, 19 nt, Artificial Sequence
  Description of Artificial Sequence: Synthetic oligonucleotide
  Sense strand starting at position 2967 of SEQ ID NO: 1889203
uuaucaguucccuaauagu

SEQ ID NO: 2585089 - RNA, 19 nt, Artificial Sequence
  Description of Artificial Sequence: Synthetic oligonucleotide
  Antisense strand to SEQ ID NO: 2585088
acuauuagggaacugauaa

SEQ ID NO: 2585090 - RNA, 19 nt, Artificial Sequence
  Description of Artificial Sequence: Synthetic oligonucleotide
  Sense strand starting at position 3085 of SEQ ID NO: 1889203
uugauuguaacauaugugu

SEQ ID NO: 2585091 - RNA, 19 nt, Artificial Sequence
  Description of Artificial Sequence: Synthetic oligonucleotide
  Antisense strand to SEQ ID NO: 2585090
acacauauguuacaaucaa

SEQ ID NO: 2585092 - RNA, 19 nt, Artificial Sequence
  Description of Artificial Sequence: Synthetic oligonucleotide
  Sense strand starting at position 3250 of SEQ ID NO: 1889203
gacuauaaaugugcaggua

SEQ ID NO: 2585093 - RNA, 19 nt, Artificial Sequence
  Description of Artificial Sequence: Synthetic oligonucleotide
  Antisense strand to SEQ ID NO: 2585092
uaccugcacauuuauaguc

SEQ ID NO: 2585094 - RNA, 19 nt, Artificial Sequence
  Description of Artificial Sequence: Synthetic oligonucleotide
  Sense strand starting at position 3251 of SEQ ID NO: 1889203
acuauaaaugugcagguau

SEQ ID NO: 2585095 - RNA, 19 nt, Artificial Sequence
  Description of Artificial Sequence: Synthetic oligonucleotide
  Antisense strand to SEQ ID NO: 2585094
auaccugcacauuuauagu

SEQ ID NO: 2585096 - RNA, 19 nt, Artificial Sequence
  Description of Artificial Sequence: Synthetic oligonucleotide
  Sense strand starting at position 3253 of SEQ ID NO: 1889203
uauaaaugugcagguauga

SEQ ID NO: 2585097 - RNA, 19 nt, Artificial Sequence
  Description of Artificial Sequence: Synthetic oligonucleotide
  Antisense strand to SEQ ID NO: 2585096
ucauaccugcacauuuaua

SEQ ID NO: 2585098 - RNA, 19 nt, Artificial Sequence
  Description of Artificial Sequence: Synthetic oligonucleotide
  Sense strand starting at position 3779 of SEQ ID NO: 1889203
ggguccuaccuguauguga

SEQ ID NO: 2585099 - RNA, 19 nt, Artificial Sequence
  Description of Artificial Sequence: Synthetic oligonucleotide
  Antisense strand to SEQ ID NO: 2585098
ucacauacagguaggaccc

SEQ ID NO: 2585100 - RNA, 19 nt, Artificial Sequence
  Description of Artificial Sequence: Synthetic oligonucleotide
  Sense strand starting at position 51 of SEQ ID NO: 1889204
aaauaaaggugauaaggaa

SEQ ID NO: 2585101 - RNA, 19 nt, Artificial Sequence
  Description of Artificial Sequence: Synthetic oligonucleotide
  Antisense strand to SEQ ID NO: 2585100
uuccuuaucaccuuuauuu

SEQ ID NO: 2585102 - RNA, 19 nt, Artificial Sequence
  Description of Artificial Sequence: Synthetic oligonucleotide
  Sense strand starting at position 159 of SEQ ID NO: 1889204
gaucucaguuaguugaaua

SEQ ID NO: 2585103 - RNA, 19 nt, Artificial Sequence
  Description of Artificial Sequence: Synthetic oligonucleotide
  Antisense strand to SEQ ID NO: 2585102
uauucaacuaacugagauc

SEQ ID NO: 2585104 - RNA, 19 nt, Artificial Sequence
  Description of Artificial Sequence: Synthetic oligonucleotide
  Sense strand starting at position 164 of SEQ ID NO: 1889204
caguuaguugaauaacgaa

SEQ ID NO: 2585105 - RNA, 19 nt, Artificial Sequence
  Description of Artificial Sequence: Synthetic oligonucleotide
  Antisense strand to SEQ ID NO: 2585104
uucguuauucaacuaacug

SEQ ID NO: 2585106 - RNA, 19 nt, Artificial Sequence
  Description of Artificial Sequence: Synthetic oligonucleotide
  Sense strand starting at position 237 of SEQ ID NO: 1889204
auaugagguuaaguauaga

SEQ ID NO: 2585107 - RNA, 19 nt, Artificial Sequence
  Description of Artificial Sequence: Synthetic oligonucleotide
  Antisense strand to SEQ ID NO: 2585106
ucuauacuuaaccucauau

SEQ ID NO: 2585108 - RNA, 19 nt, Artificial Sequence
  Description of Artificial Sequence: Synthetic oligonucleotide
  Sense strand starting at position 329 of SEQ ID NO: 1889204
ggucauuaacuuuaguugu

SEQ ID NO: 2585109 - RNA, 19 nt, Artificial Sequence
  Description of Artificial Sequence: Synthetic oligonucleotide
  Antisense strand to SEQ ID NO: 2585108
acaacuaaaguuaaugacc

SEQ ID NO: 2585110 - RNA, 19 nt, Artificial Sequence
  Description of Artificial Sequence: Synthetic oligonucleotide
  Sense strand starting at position 344 of SEQ ID NO: 1889204
uuguaacauggucauuaaa

SEQ ID NO: 2585111 - RNA, 19 nt, Artificial Sequence
  Description of Artificial Sequence: Synthetic oligonucleotide
  Antisense strand to SEQ ID NO: 2585110
uuuaaugaccauguuacaa

SEQ ID NO: 2585112 - RNA, 19 nt, Artificial Sequence
  Description of Artificial Sequence: Synthetic oligonucleotide
  Sense strand starting at position 386 of SEQ ID NO: 1889204
uuucuaauugaaggacuuu

SEQ ID NO: 2585113 - RNA, 19 nt, Artificial Sequence
  Description of Artificial Sequence: Synthetic oligonucleotide
  Antisense strand to SEQ ID NO: 2585112
aaaguccuucaauuagaaa

SEQ ID NO: 2585114 - RNA, 19 nt, Artificial Sequence
  Description of Artificial Sequence: Synthetic oligonucleotide
  Sense strand starting at position 434 of SEQ ID NO: 1889204
acuuacugagcuuauguau

SEQ ID NO: 2585115 - RNA, 19 nt, Artificial Sequence
  Description of Artificial Sequence: Synthetic oligonucleotide
  Antisense strand to SEQ ID NO: 2585114
auacauaagcucaguaagu

SEQ ID NO: 2585116 - RNA, 19 nt, Artificial Sequence
  Description of Artificial Sequence: Synthetic oligonucleotide
  Sense strand starting at position 637 of SEQ ID NO: 1889204
agagauaacucagcaguaa

SEQ ID NO: 2585117 - RNA, 19 nt, Artificial Sequence
  Description of Artificial Sequence: Synthetic oligonucleotide
  Antisense strand to SEQ ID NO: 2585116
uuacugcugaguuaucucu

SEQ ID NO: 2585118 - RNA, 19 nt, Artificial Sequence
  Description of Artificial Sequence: Synthetic oligonucleotide
  Sense strand starting at position 831 of SEQ ID NO: 1889204
gcucgugaaacagauuaga

SEQ ID NO: 2585119 - RNA, 19 nt, Artificial Sequence
  Description of Artificial Sequence: Synthetic oligonucleotide
  Antisense strand to SEQ ID NO: 2585118
ucuaaucuguuucacgagc

SEQ ID NO: 2585120 - RNA, 19 nt, Artificial Sequence
  Description of Artificial Sequence: Synthetic oligonucleotide
  Sense strand starting at position 936 of SEQ ID NO: 1889204
uauguaagacauugaacgu

SEQ ID NO: 2585121 - RNA, 19 nt, Artificial Sequence
  Description of Artificial Sequence: Synthetic oligonucleotide
  Antisense strand to SEQ ID NO: 2585120
acguucaaugucuuacaua

SEQ ID NO: 2585122 - RNA, 19 nt, Artificial Sequence
  Description of Artificial Sequence: Synthetic oligonucleotide
  Sense strand starting at position 937 of SEQ ID NO: 1889204
auguaagacauugaacguu

SEQ ID NO: 2585123 - RNA, 19 nt, Artificial Sequence
  Description of Artificial Sequence: Synthetic oligonucleotide
  Antisense strand to SEQ ID NO: 2585122
aacguucaaugucuuacau

SEQ ID NO: 2585124 - RNA, 19 nt, Artificial Sequence
  Description of Artificial Sequence: Synthetic oligonucleotide
  Sense strand starting at position 953 of SEQ ID NO: 1889204
guuugaacaugucuaaauu

SEQ ID NO: 2585125 - RNA, 19 nt, Artificial Sequence
  Description of Artificial Sequence: Synthetic oligonucleotide
  Antisense strand to SEQ ID NO: 2585124
aauuuagacauguucaaac

SEQ ID NO: 2585126 - RNA, 19 nt, Artificial Sequence
  Description of Artificial Sequence: Synthetic oligonucleotide
  Sense strand starting at position 1007 of SEQ ID NO: 1889204
guuucuuugcaguucugua

SEQ ID NO: 2585127 - RNA, 19 nt, Artificial Sequence
  Description of Artificial Sequence: Synthetic oligonucleotide
  Antisense strand to SEQ ID NO: 2585126
uacagaacugcaaagaaac

SEQ ID NO: 2585128 - RNA, 19 nt, Artificial Sequence
  Description of Artificial Sequence: Synthetic oligonucleotide
  Sense strand starting at position 1156 of SEQ ID NO: 1889204
aaaggaacgaguugaguaa

SEQ ID NO: 2585129 - RNA, 19 nt, Artificial Sequence
  Description of Artificial Sequence: Synthetic oligonucleotide
  Antisense strand to SEQ ID NO: 2585128
uuacucaacucguuccuuu

SEQ ID NO: 2585130 - RNA, 19 nt, Artificial Sequence
  Description of Artificial Sequence: Synthetic oligonucleotide
  Sense strand starting at position 1160 of SEQ ID NO: 1889204
gaacgaguugaguaaagua

SEQ ID NO: 2585131 - RNA, 19 nt, Artificial Sequence
  Description of Artificial Sequence: Synthetic oligonucleotide
  Antisense strand to SEQ ID NO: 2585130
uacuuuacucaacucguuc

SEQ ID NO: 2585132 - RNA, 19 nt, Artificial Sequence
  Description of Artificial Sequence: Synthetic oligonucleotide
  Sense strand starting at position 1366 of SEQ ID NO: 1889204
cgauaauggugcccaauuu

SEQ ID NO: 2585133 - RNA, 19 nt, Artificial Sequence
  Description of Artificial Sequence: Synthetic oligonucleotide
  Antisense strand to SEQ ID NO: 2585132
aaauugggcaccauuaucg

SEQ ID NO: 2585134 - RNA, 19 nt, Artificial Sequence
  Description of Artificial Sequence: Synthetic oligonucleotide
  Sense strand starting at position 1422 of SEQ ID NO: 1889204
uggagauguagccauguag

SEQ ID NO: 2585135 - RNA, 19 nt, Artificial Sequence
  Description of Artificial Sequence: Synthetic oligonucleotide
  Antisense strand to SEQ ID NO: 2585134
cuacauggcuacaucucca

SEQ ID NO: 2585136 - RNA, 19 nt, Artificial Sequence
  Description of Artificial Sequence: Synthetic oligonucleotide
  Sense strand starting at position 1807 of SEQ ID NO: 1889204
cgcacucuucccgcugaga

SEQ ID NO: 2585137 - RNA, 19 nt, Artificial Sequence
  Description of Artificial Sequence: Synthetic oligonucleotide
  Antisense strand to SEQ ID NO: 2585136
ucucagcgggaagagugcg

SEQ ID NO: 2585138 - RNA, 19 nt, Artificial Sequence
  Description of Artificial Sequence: Synthetic oligonucleotide
  Sense strand starting at position 1810 of SEQ ID NO: 1889204
acucuucccgcugagauca

SEQ ID NO: 2585139 - RNA, 19 nt, Artificial Sequence
  Description of Artificial Sequence: Synthetic oligonucleotide
  Antisense strand to SEQ ID NO: 2585138
ugaucucagcgggaagagu

SEQ ID NO: 2585140 - RNA, 19 nt, Artificial Sequence
  Description of Artificial Sequence: Synthetic oligonucleotide
  Sense strand starting at position 2208 of SEQ ID NO: 1889204
gggaaccuaugccuguuaa

SEQ ID NO: 2585141 - RNA, 19 nt, Artificial Sequence
  Description of Artificial Sequence: Synthetic oligonucleotide
  Antisense strand to SEQ ID NO: 2585140
uuaacaggcauagguuccc

SEQ ID NO: 2585142 - RNA, 19 nt, Artificial Sequence
  Description of Artificial Sequence: Synthetic oligonucleotide
  Sense strand starting at position 2209 of SEQ ID NO: 1889204
ggaaccuaugccuguuaaa

SEQ ID NO: 2585143 - RNA, 19 nt, Artificial Sequence
  Description of Artificial Sequence: Synthetic oligonucleotide
  Antisense strand to SEQ ID NO: 2585142
uuuaacaggcauagguucc

SEQ ID NO: 2585144 - RNA, 19 nt, Artificial Sequence
  Description of Artificial Sequence: Synthetic oligonucleotide
  Sense strand starting at position 2282 of SEQ ID NO: 1889204
gggauuggagcguaaugca

SEQ ID NO: 2585145 - RNA, 19 nt, Artificial Sequence
  Description of Artificial Sequence: Synthetic oligonucleotide
  Antisense strand to SEQ ID NO: 2585144
ugcauuacgcuccaauccc

SEQ ID NO: 2585146 - RNA, 19 nt, Artificial Sequence
  Description of Artificial Sequence: Synthetic oligonucleotide
  Sense strand starting at position 2291 of SEQ ID NO: 1889204
gcguaaugcaacguucuag

SEQ ID NO: 2585147 - RNA, 19 nt, Artificial Sequence
  Description of Artificial Sequence: Synthetic oligonucleotide
  Antisense strand to SEQ ID NO: 2585146
cuagaacguugcauuacgc

SEQ ID NO: 2585148 - RNA, 19 nt, Artificial Sequence
  Description of Artificial Sequence: Synthetic oligonucleotide
  Sense strand starting at position 2297 of SEQ ID NO: 1889204
ugcaacguucuaggaaaga

SEQ ID NO: 2585149 - RNA, 19 nt, Artificial Sequence
  Description of Artificial Sequence: Synthetic oligonucleotide
  Antisense strand to SEQ ID NO: 2585148
ucuuuccuagaacguugca

SEQ ID NO: 2585150 - RNA, 19 nt, Artificial Sequence
  Description of Artificial Sequence: Synthetic oligonucleotide
  Sense strand starting at position 2385 of SEQ ID NO: 1889204
acucauuacuguucuggaa

SEQ ID NO: 2585151 - RNA, 19 nt, Artificial Sequence
  Description of Artificial Sequence: Synthetic oligonucleotide
  Antisense strand to SEQ ID NO: 2585150
uuccagaacaguaaugagu

SEQ ID NO: 2585152 - RNA, 19 nt, Artificial Sequence
  Description of Artificial Sequence: Synthetic oligonucleotide
  Sense strand starting at position 2389 of SEQ ID NO: 1889204
auuacuguucuggaaaggu

SEQ ID NO: 2585153 - RNA, 19 nt, Artificial Sequence
  Description of Artificial Sequence: Synthetic oligonucleotide
  Antisense strand to SEQ ID NO: 2585152
accuuuccagaacaguaau

SEQ ID NO: 2585154 - RNA, 19 nt, Artificial Sequence
  Description of Artificial Sequence: Synthetic oligonucleotide
  Sense strand starting at position 2525 of SEQ ID NO: 1889204
guuccuagccaucaaugau

SEQ ID NO: 2585155 - RNA, 19 nt, Artificial Sequence
  Description of Artificial Sequence: Synthetic oligonucleotide
  Antisense strand to SEQ ID NO: 2585154
aucauugauggcuaggaac

SEQ ID NO: 2585156 - RNA, 19 nt, Artificial Sequence
  Description of Artificial Sequence: Synthetic oligonucleotide
  Sense strand starting at position 2680 of SEQ ID NO: 1889204
gcgggcuugaaacaacuau

SEQ ID NO: 2585157 - RNA, 19 nt, Artificial Sequence
  Description of Artificial Sequence: Synthetic oligonucleotide
  Antisense strand to SEQ ID NO: 2585156
auaguuguuucaagcccgc

SEQ ID NO: 2585158 - RNA, 19 nt, Artificial Sequence
  Description of Artificial Sequence: Synthetic oligonucleotide
  Sense strand starting at position 2744 of SEQ ID NO: 1889204
cuccgcuauccguuucuua

SEQ ID NO: 2585159 - RNA, 19 nt, Artificial Sequence
  Description of Artificial Sequence: Synthetic oligonucleotide
  Antisense strand to SEQ ID NO: 2585158
uaagaaacggauagcggag

SEQ ID NO: 2585160 - RNA, 19 nt, Artificial Sequence
  Description of Artificial Sequence: Synthetic oligonucleotide
  Sense strand starting at position 2746 of SEQ ID NO: 1889204
ccgcuauccguuucuuacu

SEQ ID NO: 2585161 - RNA, 19 nt, Artificial Sequence
  Description of Artificial Sequence: Synthetic oligonucleotide
  Antisense strand to SEQ ID NO: 2585160
aguaagaaacggauagcgg

SEQ ID NO: 2585162 - RNA, 19 nt, Artificial Sequence
  Description of Artificial Sequence: Synthetic oligonucleotide
  Sense strand starting at position 3102 of SEQ ID NO: 1889204
auauguaauccugacguaa

SEQ ID NO: 2585163 - RNA, 19 nt, Artificial Sequence
  Description of Artificial Sequence: Synthetic oligonucleotide
  Antisense strand to SEQ ID NO: 2585162
uuacgucaggauuacauau

SEQ ID NO: 2585164 - RNA, 19 nt, Artificial Sequence
  Description of Artificial Sequence: Synthetic oligonucleotide
  Sense strand starting at position 3178 of SEQ ID NO: 1889204
aguauaauaucaguacagu

SEQ ID NO: 2585165 - RNA, 19 nt, Artificial Sequence
  Description of Artificial Sequence: Synthetic oligonucleotide
  Antisense strand to SEQ ID NO: 2585164
acuguacugauauuauacu

SEQ ID NO: 2585166 - RNA, 19 nt, Artificial Sequence
  Description of Artificial Sequence: Synthetic oligonucleotide
  Sense strand starting at position 3179 of SEQ ID NO: 1889204
guauaauaucaguacaguu

SEQ ID NO: 2585167 - RNA, 19 nt, Artificial Sequence
  Description of Artificial Sequence: Synthetic oligonucleotide
  Antisense strand to SEQ ID NO: 2585166
aacuguacugauauuauac

SEQ ID NO: 2585168 - RNA, 19 nt, Artificial Sequence
  Description of Artificial Sequence: Synthetic oligonucleotide
  Sense strand starting at position 3226 of SEQ ID NO: 1889204
ccuagacaucuguagauuc

SEQ ID NO: 2585169 - RNA, 19 nt, Artificial Sequence
  Description of Artificial Sequence: Synthetic oligonucleotide
  Antisense strand to SEQ ID NO: 2585168
gaaucuacagaugucuagg

SEQ ID NO: 2585170 - RNA, 19 nt, Artificial Sequence
  Description of Artificial Sequence: Synthetic oligonucleotide
  Sense strand starting at position 3494 of SEQ ID NO: 1889204
accuauccugagugugaca

SEQ ID NO: 2585171 - RNA, 19 nt, Artificial Sequence
  Description of Artificial Sequence: Synthetic oligonucleotide
  Antisense strand to SEQ ID NO: 2585170
ugucacacucaggauaggu

SEQ ID NO: 2585172 - RNA, 19 nt, Artificial Sequence
  Description of Artificial Sequence: Synthetic oligonucleotide
  Sense strand starting at position 3496 of SEQ ID NO: 1889204
cuauccugagugugacaua

SEQ ID NO: 2585173 - RNA, 19 nt, Artificial Sequence
  Description of Artificial Sequence: Synthetic oligonucleotide
  Antisense strand to SEQ ID NO: 2585172
uaugucacacucaggauag

SEQ ID NO: 2585174 - RNA, 19 nt, Artificial Sequence
  Description of Artificial Sequence: Synthetic oligonucleotide
  Sense strand starting at position 3666 of SEQ ID NO: 1889204
acauuuauaucagggacau

SEQ ID NO: 2585175 - RNA, 19 nt, Artificial Sequence
  Description of Artificial Sequence: Synthetic oligonucleotide
  Antisense strand to SEQ ID NO: 2585174
augucccugauauaaaugu

SEQ ID NO: 2585176 - RNA, 19 nt, Artificial Sequence
  Description of Artificial Sequence: Synthetic oligonucleotide
  Sense strand starting at position 3892 of SEQ ID NO: 1889204
gcaaguauuuguuugagua

SEQ ID NO: 2585177 - RNA, 19 nt, Artificial Sequence
  Description of Artificial Sequence: Synthetic oligonucleotide
  Antisense strand to SEQ ID NO: 2585176
uacucaaacaaauacuugc

SEQ ID NO: 2585178 - RNA, 19 nt, Artificial Sequence
  Description of Artificial Sequence: Synthetic oligonucleotide
  Sense strand starting at position 3941 of SEQ ID NO: 1889204
cguguaguaauuugauguu

SEQ ID NO: 2585179 - RNA, 19 nt, Artificial Sequence
  Description of Artificial Sequence: Synthetic oligonucleotide
  Antisense strand to SEQ ID NO: 2585178
aacaucaaauuacuacacg

SEQ ID NO: 2585180 - RNA, 19 nt, Artificial Sequence
  Description of Artificial Sequence: Synthetic oligonucleotide
  Sense strand starting at position 91 of SEQ ID NO: 1889205
auacacgcaucaguuuaua

SEQ ID NO: 2585181 - RNA, 19 nt, Artificial Sequence
  Description of Artificial Sequence: Synthetic oligonucleotide
  Antisense strand to SEQ ID NO: 2585180
uauaaacugaugcguguau

SEQ ID NO: 2585182 - RNA, 19 nt, Artificial Sequence
  Description of Artificial Sequence: Synthetic oligonucleotide
  Sense strand starting at position 99 of SEQ ID NO: 1889205
aucaguuuauaggucaaau

SEQ ID NO: 2585183 - RNA, 19 nt, Artificial Sequence
  Description of Artificial Sequence: Synthetic oligonucleotide
  Antisense strand to SEQ ID NO: 2585182
auuugaccuauaaacugau

SEQ ID NO: 2585184 - RNA, 19 nt, Artificial Sequence
  Description of Artificial Sequence: Synthetic oligonucleotide
  Sense strand starting at position 424 of SEQ ID NO: 1889205
cgaaguauuccagaguacg

SEQ ID NO: 2585185 - RNA, 19 nt, Artificial Sequence
  Description of Artificial Sequence: Synthetic oligonucleotide
  Antisense strand to SEQ ID NO: 2585184
cguacucuggaauacuucg

SEQ ID NO: 2585186 - RNA, 19 nt, Artificial Sequence
  Description of Artificial Sequence: Synthetic oligonucleotide
  Sense strand starting at position 660 of SEQ ID NO: 1889205
agacacagagcuuguuaau

SEQ ID NO: 2585187 - RNA, 19 nt, Artificial Sequence
  Description of Artificial Sequence: Synthetic oligonucleotide
  Antisense strand to SEQ ID NO: 2585186
auuaacaagcucugugucu

SEQ ID NO: 2585188 - RNA, 19 nt, Artificial Sequence
  Description of Artificial Sequence: Synthetic oligonucleotide
  Sense strand starting at position 667 of SEQ ID NO: 1889205
gagcuuguuaauggucuga

SEQ ID NO: 2585189 - RNA, 19 nt, Artificial Sequence
  Description of Artificial Sequence: Synthetic oligonucleotide
  Antisense strand to SEQ ID NO: 2585188
ucagaccauuaacaagcuc

SEQ ID NO: 2585190 - RNA, 19 nt, Artificial Sequence
  Description of Artificial Sequence: Synthetic oligonucleotide
  Sense strand starting at position 669 of SEQ ID NO: 1889205
gcuuguuaauggucugaga

SEQ ID NO: 2585191 - RNA, 19 nt, Artificial Sequence
  Description of Artificial Sequence: Synthetic oligonucleotide
  Antisense strand to SEQ ID NO: 2585190
ucucagaccauuaacaagc

SEQ ID NO: 2585192 - RNA, 19 nt, Artificial Sequence
  Description of Artificial Sequence: Synthetic oligonucleotide
  Sense strand starting at position 671 of SEQ ID NO: 1889205
uuguuaauggucugagaaa

SEQ ID NO: 2585193 - RNA, 19 nt, Artificial Sequence
  Description of Artificial Sequence: Synthetic oligonucleotide
  Antisense strand to SEQ ID NO: 2585192
uuucucagaccauuaacaa

SEQ ID NO: 2585194 - RNA, 19 nt, Artificial Sequence
  Description of Artificial Sequence: Synthetic oligonucleotide
  Sense strand starting at position 730 of SEQ ID NO: 1889205
acagauuggugagugccaa

SEQ ID NO: 2585195 - RNA, 19 nt, Artificial Sequence
  Description of Artificial Sequence: Synthetic oligonucleotide
  Antisense strand to SEQ ID NO: 2585194
uuggcacucaccaaucugu

SEQ ID NO: 2585196 - RNA, 19 nt, Artificial Sequence
  Description of Artificial Sequence: Synthetic oligonucleotide
  Sense strand starting at position 1028 of SEQ ID NO: 1889205
acccaaccuuaaucgagua

SEQ ID NO: 2585197 - RNA, 19 nt, Artificial Sequence
  Description of Artificial Sequence: Synthetic oligonucleotide
  Antisense strand to SEQ ID NO: 2585196
uacucgauuaagguugggu

SEQ ID NO: 2585198 - RNA, 19 nt, Artificial Sequence
  Description of Artificial Sequence: Synthetic oligonucleotide
  Sense strand starting at position 1033 of SEQ ID NO: 1889205
accuuaaucgaguaguuga

SEQ ID NO: 2585199 - RNA, 19 nt, Artificial Sequence
  Description of Artificial Sequence: Synthetic oligonucleotide
  Antisense strand to SEQ ID NO: 2585198
ucaacuacucgauuaaggu

SEQ ID NO: 2585200 - RNA, 19 nt, Artificial Sequence
  Description of Artificial Sequence: Synthetic oligonucleotide
  Sense strand starting at position 1385 of SEQ ID NO: 1889205
guugacuuacgucaggcau

SEQ ID NO: 2585201 - RNA, 19 nt, Artificial Sequence
  Description of Artificial Sequence: Synthetic oligonucleotide
  Antisense strand to SEQ ID NO: 2585200
augccugacguaagucaac

SEQ ID NO: 2585202 - RNA, 19 nt, Artificial Sequence
  Description of Artificial Sequence: Synthetic oligonucleotide
  Sense strand starting at position 1397 of SEQ ID NO: 1889205
caggcauugcuccacugua

SEQ ID NO: 2585203 - RNA, 19 nt, Artificial Sequence
  Description of Artificial Sequence: Synthetic oligonucleotide
  Antisense strand to SEQ ID NO: 2585202
uacaguggagcaaugccug

SEQ ID NO: 2585204 - RNA, 19 nt, Artificial Sequence
  Description of Artificial Sequence: Synthetic oligonucleotide
  Sense strand starting at position 1506 of SEQ ID NO: 1889205
uggucacgucuauggagaa

SEQ ID NO: 2585205 - RNA, 19 nt, Artificial Sequence
  Description of Artificial Sequence: Synthetic oligonucleotide
  Antisense strand to SEQ ID NO: 2585204
uucuccauagacgugacca

SEQ ID NO: 2585206 - RNA, 19 nt, Artificial Sequence
  Description of Artificial Sequence: Synthetic oligonucleotide
  Sense strand starting at position 1525 of SEQ ID NO: 1889205
aaggguagucucugggaug

SEQ ID NO: 2585207 - RNA, 19 nt, Artificial Sequence
  Description of Artificial Sequence: Synthetic oligonucleotide
  Antisense strand to SEQ ID NO: 2585206
caucccagagacuacccuu

SEQ ID NO: 2585208 - RNA, 19 nt, Artificial Sequence
  Description of Artificial Sequence: Synthetic oligonucleotide
  Sense strand starting at position 1527 of SEQ ID NO: 1889205
ggguagucucugggaugga

SEQ ID NO: 2585209 - RNA, 19 nt, Artificial Sequence
  Description of Artificial Sequence: Synthetic oligonucleotide
  Antisense strand to SEQ ID NO: 2585208
uccaucccagagacuaccc

SEQ ID NO: 2585210 - RNA, 19 nt, Artificial Sequence
  Description of Artificial Sequence: Synthetic oligonucleotide
  Sense strand starting at position 1711 of SEQ ID NO: 1889205
uuaggagaguccguaauga

SEQ ID NO: 2585211 - RNA, 19 nt, Artificial Sequence
  Description of Artificial Sequence: Synthetic oligonucleotide
  Antisense strand to SEQ ID NO: 2585210
ucauuacggacucuccuaa

SEQ ID NO: 2585212 - RNA, 19 nt, Artificial Sequence
  Description of Artificial Sequence: Synthetic oligonucleotide
  Sense strand starting at position 2062 of SEQ ID NO: 1889205
aaugauaauuccgugaggu

SEQ ID NO: 2585213 - RNA, 19 nt, Artificial Sequence
  Description of Artificial Sequence: Synthetic oligonucleotide
  Antisense strand to SEQ ID NO: 2585212
accucacggaauuaucauu

SEQ ID NO: 2585214 - RNA, 19 nt, Artificial Sequence
  Description of Artificial Sequence: Synthetic oligonucleotide
  Sense strand starting at position 2063 of SEQ ID NO: 1889205
augauaauuccgugagguc

SEQ ID NO: 2585215 - RNA, 19 nt, Artificial Sequence
  Description of Artificial Sequence: Synthetic oligonucleotide
  Antisense strand to SEQ ID NO: 2585214
gaccucacggaauuaucau

SEQ ID NO: 2585216 - RNA, 19 nt, Artificial Sequence
  Description of Artificial Sequence: Synthetic oligonucleotide
  Sense strand starting at position 2064 of SEQ ID NO: 1889205
ugauaauuccgugaggucu

SEQ ID NO: 2585217 - RNA, 19 nt, Artificial Sequence
  Description of Artificial Sequence: Synthetic oligonucleotide
  Antisense strand to SEQ ID NO: 2585216
agaccucacggaauuauca

SEQ ID NO: 2585218 - RNA, 19 nt, Artificial Sequence
  Description of Artificial Sequence: Synthetic oligonucleotide
  Sense strand starting at position 2091 of SEQ ID NO: 1889205
guaggagcuucuguggaca

SEQ ID NO: 2585219 - RNA, 19 nt, Artificial Sequence
  Description of Artificial Sequence: Synthetic oligonucleotide
  Antisense strand to SEQ ID NO: 2585218
uguccacagaagcuccuac

SEQ ID NO: 2585220 - RNA, 19 nt, Artificial Sequence
  Description of Artificial Sequence: Synthetic oligonucleotide
  Sense strand starting at position 2096 of SEQ ID NO: 1889205
agcuucuguggacaggaau

SEQ ID NO: 2585221 - RNA, 19 nt, Artificial Sequence
  Description of Artificial Sequence: Synthetic oligonucleotide
  Antisense strand to SEQ ID NO: 2585220
auuccuguccacagaagcu

SEQ ID NO: 2585222 - RNA, 19 nt, Artificial Sequence
  Description of Artificial Sequence: Synthetic oligonucleotide
  Sense strand starting at position 2259 of SEQ ID NO: 1889205
auaucugagagaggucuua

SEQ ID NO: 2585223 - RNA, 19 nt, Artificial Sequence
  Description of Artificial Sequence: Synthetic oligonucleotide
  Antisense strand to SEQ ID NO: 2585222
uaagaccucucucagauau

SEQ ID NO: 2585224 - RNA, 19 nt, Artificial Sequence
  Description of Artificial Sequence: Synthetic oligonucleotide
  Sense strand starting at position 2896 of SEQ ID NO: 1889205
gcgccucacagggauaacu

SEQ ID NO: 2585225 - RNA, 19 nt, Artificial Sequence
  Description of Artificial Sequence: Synthetic oligonucleotide
  Antisense strand to SEQ ID NO: 2585224
aguuaucccugugaggcgc

SEQ ID NO: 2585226 - RNA, 19 nt, Artificial Sequence
  Description of Artificial Sequence: Synthetic oligonucleotide
  Sense strand starting at position 2898 of SEQ ID NO: 1889205
gccucacagggauaacuuu

SEQ ID NO: 2585227 - RNA, 19 nt, Artificial Sequence
  Description of Artificial Sequence: Synthetic oligonucleotide
  Antisense strand to SEQ ID NO: 2585226
aaaguuaucccugugaggc

SEQ ID NO: 2585228 - RNA, 19 nt, Artificial Sequence
  Description of Artificial Sequence: Synthetic oligonucleotide
  Sense strand starting at position 2904 of SEQ ID NO: 1889205
cagggauaacuuugaguug

SEQ ID NO: 2585229 - RNA, 19 nt, Artificial Sequence
  Description of Artificial Sequence: Synthetic oligonucleotide
  Antisense strand to SEQ ID NO: 2585228
caacucaaaguuaucccug

SEQ ID NO: 2585230 - RNA, 19 nt, Artificial Sequence
  Description of Artificial Sequence: Synthetic oligonucleotide
  Sense strand starting at position 2907 of SEQ ID NO: 1889205
ggauaacuuugaguugggu

SEQ ID NO: 2585231 - RNA, 19 nt, Artificial Sequence
  Description of Artificial Sequence: Synthetic oligonucleotide
  Antisense strand to SEQ ID NO: 2585230
acccaacucaaaguuaucc

SEQ ID NO: 2585232 - RNA, 19 nt, Artificial Sequence
  Description of Artificial Sequence: Synthetic oligonucleotide
  Sense strand starting at position 2990 of SEQ ID NO: 1889205
cuuuguacguaucuuauuu

SEQ ID NO: 2585233 - RNA, 19 nt, Artificial Sequence
  Description of Artificial Sequence: Synthetic oligonucleotide
  Antisense strand to SEQ ID NO: 2585232
aaauaagauacguacaaag

SEQ ID NO: 2585234 - RNA, 19 nt, Artificial Sequence
  Description of Artificial Sequence: Synthetic oligonucleotide
  Sense strand starting at position 3022 of SEQ ID NO: 1889205
gaggcaaguuuagugacau

SEQ ID NO: 2585235 - RNA, 19 nt, Artificial Sequence
  Description of Artificial Sequence: Synthetic oligonucleotide
  Antisense strand to SEQ ID NO: 2585234
augucacuaaacuugccuc

SEQ ID NO: 2585236 - RNA, 19 nt, Artificial Sequence
  Description of Artificial Sequence: Synthetic oligonucleotide
  Sense strand starting at position 3058 of SEQ ID NO: 1889205
uuccguuacuuagugauuu

SEQ ID NO: 2585237 - RNA, 19 nt, Artificial Sequence
  Description of Artificial Sequence: Synthetic oligonucleotide
  Antisense strand to SEQ ID NO: 2585236
aaaucacuaaguaacggaa

SEQ ID NO: 2585238 - RNA, 19 nt, Artificial Sequence
  Description of Artificial Sequence: Synthetic oligonucleotide
  Sense strand starting at position 3120 of SEQ ID NO: 1889205
auguauguugaggaauugu

SEQ ID NO: 2585239 - RNA, 19 nt, Artificial Sequence
  Description of Artificial Sequence: Synthetic oligonucleotide
  Antisense strand to SEQ ID NO: 2585238
acaauuccucaacauacau

SEQ ID NO: 2585240 - RNA, 19 nt, Artificial Sequence
  Description of Artificial Sequence: Synthetic oligonucleotide
  Sense strand starting at position 3240 of SEQ ID NO: 1889205
ucaaauaguuuacugguua

SEQ ID NO: 2585241 - RNA, 19 nt, Artificial Sequence
  Description of Artificial Sequence: Synthetic oligonucleotide
  Antisense strand to SEQ ID NO: 2585240
uaaccaguaaacuauuuga

SEQ ID NO: 2585242 - RNA, 19 nt, Artificial Sequence
  Description of Artificial Sequence: Synthetic oligonucleotide
  Sense strand starting at position 3253 of SEQ ID NO: 1889205
ugguuauaccuccagauau

SEQ ID NO: 2585243 - RNA, 19 nt, Artificial Sequence
  Description of Artificial Sequence: Synthetic oligonucleotide
  Antisense strand to SEQ ID NO: 2585242
auaucuggagguauaacca

SEQ ID NO: 2585244 - RNA, 19 nt, Artificial Sequence
  Description of Artificial Sequence: Synthetic oligonucleotide
  Sense strand starting at position 3309 of SEQ ID NO: 1889205
gggaaauguuccuuuauaa

SEQ ID NO: 2585245 - RNA, 19 nt, Artificial Sequence
  Description of Artificial Sequence: Synthetic oligonucleotide
  Antisense strand to SEQ ID NO: 2585244
uuauaaaggaacauuuccc

SEQ ID NO: 2585246 - RNA, 19 nt, Artificial Sequence
  Description of Artificial Sequence: Synthetic oligonucleotide
  Sense strand starting at position 3316 of SEQ ID NO: 1889205
guuccuuuauaagugaaga

SEQ ID NO: 2585247 - RNA, 19 nt, Artificial Sequence
  Description of Artificial Sequence: Synthetic oligonucleotide
  Antisense strand to SEQ ID NO: 2585246
ucuucacuuauaaaggaac

SEQ ID NO: 2585248 - RNA, 19 nt, Artificial Sequence
  Description of Artificial Sequence: Synthetic oligonucleotide
  Sense strand starting at position 3404 of SEQ ID NO: 1889205
guuuaaaugagaggacagu

SEQ ID NO: 2585249 - RNA, 19 nt, Artificial Sequence
  Description of Artificial Sequence: Synthetic oligonucleotide
  Antisense strand to SEQ ID NO: 2585248
acuguccucucauuuaaac

SEQ ID NO: 2585250 - RNA, 19 nt, Artificial Sequence
  Description of Artificial Sequence: Synthetic oligonucleotide
  Sense strand starting at position 3582 of SEQ ID NO: 1889205
guugaaucgcuacaccaca

SEQ ID NO: 2585251 - RNA, 19 nt, Artificial Sequence
  Description of Artificial Sequence: Synthetic oligonucleotide
  Antisense strand to SEQ ID NO: 2585250
ugugguguagcgauucaac

SEQ ID NO: 2585252 - RNA, 19 nt, Artificial Sequence
  Description of Artificial Sequence: Synthetic oligonucleotide
  Sense strand starting at position 3587 of SEQ ID NO: 1889205
aucgcuacaccacagaaua

SEQ ID NO: 2585253 - RNA, 19 nt, Artificial Sequence
  Description of Artificial Sequence: Synthetic oligonucleotide
  Antisense strand to SEQ ID NO: 2585252
uauucugugguguagcgau

SEQ ID NO: 2585254 - RNA, 19 nt, Artificial Sequence
  Description of Artificial Sequence: Synthetic oligonucleotide
  Sense strand starting at position 3788 of SEQ ID NO: 1889205
ucacuugaggcagguaauu

SEQ ID NO: 2585255 - RNA, 19 nt, Artificial Sequence
  Description of Artificial Sequence: Synthetic oligonucleotide
  Antisense strand to SEQ ID NO: 2585254
aauuaccugccucaaguga

SEQ ID NO: 2585256 - RNA, 19 nt, Artificial Sequence
  Description of Artificial Sequence: Synthetic oligonucleotide
  Sense strand starting at position 3790 of SEQ ID NO: 1889205
acuugaggcagguaauuau

SEQ ID NO: 2585257 - RNA, 19 nt, Artificial Sequence
  Description of Artificial Sequence: Synthetic oligonucleotide
  Antisense strand to SEQ ID NO: 2585256
auaauuaccugccucaagu

SEQ ID NO: 2585258 - RNA, 19 nt, Artificial Sequence
  Description of Artificial Sequence: Synthetic oligonucleotide
  Sense strand starting at position 3971 of SEQ ID NO: 1889205
auguacauuuggcagauua

SEQ ID NO: 2585259 - RNA, 19 nt, Artificial Sequence
  Description of Artificial Sequence: Synthetic oligonucleotide
  Antisense strand to SEQ ID NO: 2585258
uaaucugccaaauguacau
